United States Patent Application Publication US 2012/0260373 A1 - sequence listing, part 2

SEQ ID NO: 2596 - DNA, 2433 bp, Panicum virgatum
  misc_feature: Ceres Clone ID no. 1768954
  misc_feature: Encodes the peptide sequence at SEQ ID NO. 2597
ggaggcgacggaccacggaccagagagagctcaccgccgtcgcgagataaaccacccgtggctccacggattccgagctgccgctgcccgtcgggaggaagatgacggtgggcgccgggatcgcggtccaggacgggagcctggtggcgctgggggccaagatcctgcgggaggtgcgcggcaatgtgcacgtcacgccggccgccgggggcggcctcaccaacggcgccttcctcggcgtgcggtccgcgcccgccggcagccgcagcgtcttccccgttgggaagctccgggacctacggttcatgtgcactttccggttcaagatgtggtggatgacgcagaggatgggctcgtcaggccgtgacatccccttcgagacacagttcttgatcgtcgagggcactgatggaccgcagttcaccagcgatagcaccgagcgacctgtggtgtacactgtcttccttccgatattggaggggtcattccgtgctgttcttcaggggaacgctgatgatgagctggagatttgcttggagagtggtgatccagatgtggaatcctttgaaggcacccatcttgttttcgtcggtgctggatcggatccatttgaagtgatcacaaattcagtaaaagctgttgagaggcacttgcagacgttttctcacagggaaaagaaaaagatgccagacattctaaactggtttggttggtgcacgtgggatgcattttacacaaacgttactgctgaaggagtgaaggagggattacagagctttcaaaaaggtggagtttctcctaagtttgtcataattgacgatggatggcaatcggtcggtatggatcccgtgggaattgcgtgcttagctgataactcagccaactttgcaaacaggttgactcacattaaggagaaccacaagtttcagaaaaatgggagggagggtcacagggaagatgatccagcaaaaggccttgcacatatcgtcagtgaaattaaaggaaagcatgagctgaagtatgtgtatgtgtggcacgcgattaccggatactggggtggagtcaggccaggtgttgttggaatggagcaatatgaatcgaagatgcagcaccctgtgtcatcaccaggagttcagaaaaacgaaccctgtgatgctttgaacagtataacaactaatggactgggccttgtgaaccctgaaaaagtattcagtttctacaatgagctccattcttatcttgcatctgctgggatcgatggagttaaggtggacgtgcagaacatccttgagacactaggtgctggccatgggggaagggtactgctggctagaaagtatcaacaggctttggaagcttccatcgctaggaacttccctgacaatggcatcatatcatgcatgagccacaacacagacaacttatatagttcaaaaaggagcgcagttgtgagagcctctgatgatttctggccgagagacctggcttcccatactatacacattgcatctgttgcctataacactgtctttctcggagaattcatgcagcctgattgggacatgttccatagtgttcaccctatggctgaataccacgctgcagcccgagcagttggcggttgtgccatatacgtcagtgacaagcctggaagccatgacttcaatttgctgaagaaacttgtgcttcctgacggatcgatcctgcgtgccaaactccctgggagaccaaccagagactgcctgttctccgatcctgccagggacggcaaaagcatcctcaagatctggaacctgaacgatcactccggtgtcattggcgccttcaactgccaaggtgccggctggtgccgggtagggaagaagaaccttgtccatgatgagcagcccggaacggtcaccggtgtcatccgggcacgggatgtggactaccttgcaaaggttgctgatcaaagctggaacggcgacgtgatcgtgtattcgcacgtcggaggagaggtggtctacctgccgaagaacgcctccttgcccgtgacgctgagatcacgcgagtacgaggtgttcaccgtcgtcccagtgaaatgcctgccgagtggcgcctcctttgcgccgatcggcctgaccggaatgttcaactccggcggcgcggtgagggagctgagattcggcgaggacgcaggcgtccagctcaaagtgcggggctcgggcactgtggcggcatactcctcagcaaagccgaagagtgtagccgtcgattccacggtggttgatttctcctacgacgaggcctgtggtttggtcacctttgagcttggccttcccaagcaagaactgtacctgtggaccgtttcggtagagtactgagatcgatgtaatgagaaaagttttttttaaagatgtaatgagaaaagttcagatatggcttcctgagagc

SEQ ID NO: 2597 - protein, 753 aa, Panicum virgatum
  misc_feature (7)..(737): Pfam Name: Raffinose_syn Pfam Description: Raffinose synthase or seed imbibition p
  misc_feature: Ceres Clone ID no. 1768954
  misc_feature: Bit score of 1249.9 for HMM based on sequences of Figure 37
  misc_feature: Functional Homolog Of SEQ ID NO. 2544
MTVGAGIAVQDGSLVALGAKILREVRGNVHVTPAAGGGLTNGAFLGVRSAPAGSRSVFPVGKLRDLRFMCTFRFKMWWMTQRMGSSGRDIPFETQFLIVEGTDGPQFTSDSTERPVVYTVFLPILEGSFRAVLQGNADDELEICLESGDPDVESFEGTHLVFVGAGSDPFEVITNSVKAVERHLQTFSHREKKKMPDILNWFGWCTWDAFYTNVTAEGVKEGLQSFQKGGVSPKFVIIDDGWQSVGMDPVGIACLADNSANFANRLTHIKENHKFQKNGREGHREDDPAKGLAHIVSEIKGKHELKYVYVWHAITGYWGGVRPGVVGMEQYESKMQHPVSSPGVQKNEPCDALNSITTNGLGLVNPEKVFSFYNELHSYLASAGIDGVKVDVQNILETLGAGHGGRVLLARKYQQALEASIARNFPDNGIISCMSHNTDNLYSSKRSAVVRASDDFWPRDLASHTIHIASVAYNTVFLGEFMQPDWDMFHSVHPMAEYHAAARAVGGCAIYVSDKPGSHDFNLLKKLVLPDGSILRAKLPGRPTRDCLFSDPARDGKSILKIWNLNDHSGVIGAFNCQGAGWCRVGKKNLVHDEQPGTVTGVIRARDVDYLAKVADQSWNGDVIVYSHVGGEVVYLPKNASLPVTLRSREYEVFTVVPVKCLPSGASFAPIGLTGMFNSGGAVRELRFGEDAGVQLKVRGSGTVAAYSSAKPKSVAVDSTVVDFSYDEACGLVTFELGLPKQELYLWTVSVEY

SEQ ID NO: 2598 - DNA, 1642 bp, Panicum virgatum
  misc_feature: Ceres Clone ID no. 1809393
  misc_feature: Encodes the peptide sequence at SEQ ID NO. 2599
gatccgatccagctgaagaaaacaaacaacttcgagcagctttcgtgcaattattccagcgccgcgcatgatcctccaacctccaagccgcaaagattccaatttgatagcgcccagaggagaagaagagggtaattattgatttctcggagccagaagtcgcaatggcgtctccaccgcttcagttcgcggccgcgcccttgctgctgctgctgctgctgctggcagtagcagtcccggccgcacggtccagccgtgtcttctccgtggctgactacggcgcggttggggatgggtcccgctacgacacagcggcgatccaggccgccgtggacgcctgcgcggcggcgggcgagggccgcgtcctcctcccggcgccgggcgactacctgacggcgaccgtccacctccgctcgcgggtggtgctggaggtggcccccggcgcgcggctgctgggcgggaccaggcaggcggactacccgcccgaatcgcgccgctggtacgtcgtcctggccgagaacaccacgggggccggcatcacgggcggcggcgagatcaacggccagggcgaggcgttcgtggtcacgcccagcgaggtgaagaacgtcatggtgagctggaacgccaccggcgattgcctgggcgacgagtgccggccgcggctcgtcggcttcattgactccaaggatgttaggatccacgacatcacactcaaccagcctgcctactggtgtcttcaccttgtcagatgtgacaacacagtgatccgcaatgtgtctatatttggggattttaagagtcccaacaatgatggcattgacattacggattctaacaacaccgttataaccgattgccacatagacactggagatgatgctttatgcccaaagtcatccactgggcccgtttgcaacttgacagccacaaactgttggatccggactaaatcttgtgctatcaagtttggaagtgcaagctacttcaacttcaataagctggtcttcaacaacattacaatagttgattcacatcgaggacttgggatgcagatccgggatggaggaaatgttagtgatgtgctgttttcaaacattaaaatgagcaccagatactaccatcctttatggtggggaagagccgaaccaatctacatcacaacttgcccaaggcacccagattcgaaagaaggtaccatttcagacataagattcatcaacatctcatcagtatcagaaaatggagttttcctggctggatcaaagcacgggctgctccgcaatctgaaattcaagaatgtcgacctgacctacaagcgttggacaaactacacgggaggcctgtatgattacagacctggatgcgagaagatggtgaagcataagactggtggcatgatggtggagcacgtctctggcctggagatcgacaacgtaaggatgagatgggcgagaggaagcctgaaaggctgggacgtcaaccccatccttttcaggccgtcgaccatcgacaagctgtctttccatgactggcagtcagtggatgttcagtgaatttgccccgccccaattgtacctgtgtatctgtatcacgaattcacgatgaataaaagggttgattcttttttgccaaatatgctaat

SEQ ID NO: 2599 - protein, 462 aa, Panicum virgatum
  misc_feature (59)..(417): Pfam Name: Glyco_hydro_28 Pfam Description: Glycosyl hydrolases family 28
  misc_feature: Ceres Clone ID no. 1809393
  misc_feature: Bit score of 1169.9 for HMM based on sequences of Figure 38
  misc_feature: Functional Homolog Of SEQ ID NO. 2599
  misc_feature: in Figure 38
MASPPLQFAAAPLLLLLLLLAVAVPAARSSRVFSVADYGAVGDGSRYDTAAIQAAVDACAAAGEGRVLLPAPGDYLTATVHLRSRVVLEVAPGARLLGGTRQADYPPESRRWYVVLAENTTGAGITGGGEINGQGEAFVVTPSEVKNVMVSWNATGDCLGDECRPRLVGFIDSKDVRIHDITLNQPAYWCLHLVRCDNTVIRNVSIFGDFKSPNNDGIDITDSNNTVITDCHIDTGDDALCPKSSTGPVCNLTATNCWIRTKSCAIKFGSASYFNFNKLVFNNITIVDSHRGLGMQIRDGGNVSDVLFSNIKMSTRYYHPLWWGRAEPIYITTCPRHPDSKEGTISDIRFINISSVSENGVFLAGSKHGLLRNLKFKNVDLTYKRWTNYTGGLYDYRPGCEKMVKHKTGGMMVEHVSGLEIDNVRMRWARGSLKGWDVNPILFRPSTIDKLSFHDWQSVDVQ

SEQ ID NO: 2600 - DNA, 1389 bp, Sorghum bicolor
  misc_feature: Ceres Annot ID no. 8654883
  misc_feature: Encodes the peptide sequence at SEQ ID NO. 2601
atggcttctccgccgcttcagctcgccgccgcgcccttgctgctgctgctgctgctgctgctagtagtggtgccgggcacagggtccagccgcgtcttttcggtggccgactatggtgcggcgggcgatgggtcccattacgacacggcggcgattcaggccactgtagacgcctgcgcggcggcgggcgggggccgcgtccttctcccagcgccgggcgactacctgacagcgaccgtccacctccgctcgcgggtggtgctggatgtgccccccggcgcgcggcttctgggcgggaccaggcaggcggactacccgcccgagtcgcgccggtggtacgtcgtactggccgagaacaccacgggcgccggcgtcacggggggcggcgagatcaacggccagggcggggcgttcgtggtcacgcccagcgaggtgaagaacgtcatggtgagctggaacgccaccggcgactgcctgggcgatgagtgccggccgcggcttgttggcttcattgactccaaggatgttaagatccacgacatcacactcaacaaacccgcctactggtgtcttcaccttgtcagatgtgacaacactgtcatccacaatgtgtccatatttggagatttgaacagtcccaacaatgatggcattgacattgaggattctaacaacactgtcataactgattgccacatagacacgggagacgatgctatatgcccaaagtcgaccactggaccggtttacaacttgacggcaacaaactcttggatccggactaaatcttgtgcaatcaagtttggaagtgcaagcttctttgacttcaaaaggctggttttcgacaatattacaatagttgatgcacatcgaggacttgggatgcagatccgggatggagggaatgtgagtgatgtcatgttttcaaacattaaaatgagcaccaggtactaccatcctttatggtggggcagagccgagccaatctacatcacaacttgcccaaggcacccagattcaaaagaaggcaccatttcagacataagattcatcaacatctcatcggtatcagaaaatggtatttttctggctggatcgaagcacgggctgctccgcaacctgaaattcaagaacatagaccttacctataagcggtggacaaactacacaggggggctctatgattacaggcctgggtgccagaagatggtgaagcacaagactggtggcatgatgctggagcatatctccggcctggagattgacaacgtgaggatgagatgggcaagaggaagcctgaagggctggaacgttaaccctatcctcttccgtccgtcaaccattgacaaactgtcttttcatgactggcagtcagtggatgttcagtaa

SEQ ID NO: 2601 - protein, 462 aa, Sorghum bicolor
  misc_feature (59)..(402): Pfam Name: Glyco_hydro_28 Pfam Description: Glycosyl hydrolases family 28
  misc_feature: Ceres Annot ID no. 8654883
  misc_feature: Bit score of 1180.3 for HMM based on sequences of Figure 38
  misc_feature: Functional Homolog Of SEQ ID NO. 2599
  misc_feature: in Figure 38
MASPPLQLAAAPLLLLLLLLLVVVPGTGSSRVFSVADYGAAGDGSHYDTAAIQATVDACAAAGGGRVLLPAPGDYLTATVHLRSRVVLDVPPGARLLGGTRQADYPPESRRWYVVLAENTTGAGVTGGGEINGQGGAFVVTPSEVKNVMVSWNATGDCLGDECRPRLVGFIDSKDVKIHDITLNKPAYWCLHLVRCDNTVIHNVSIFGDLNSPNNDGIDIEDSNNTVITDCHIDTGDDAICPKSTTGPVYNLTATNSWIRTKSCAIKFGSASFFDFKRLVFDNITIVDAHRGLGMQIRDGGNVSDVMFSNIKMSTRYYHPLWWGRAEPIYITTCPRHPDSKEGTISDIRFINISSVSENGIFLAGSKHGLLRNLKFKNIDLTYKRWTNYTGGLYDYRPGCQKMVKHKTGGMMLEHISGLEIDNVRMRWARGSLKGWNVNPILFRPSTIDKLSFHDWQSVDVQ

SEQ ID NO: 2602 - DNA, 1533 bp, Zea mays
  misc_feature: Ceres Clone ID no. 236513
  misc_feature: Encodes the peptide sequence at SEQ ID NO. 2603
atccgtgtccgtgcgatttttctacacaatcgtctcgcaaagattctcgttggtcagtttgagacttagccttggaggagaacagaacagccacgatgacttcgccgattcagctcgcggccgcgcctttgctgctgctagtagtagtggtcgcgggcacacggtcgagccgcatcttttcggtggccgactatggtgcggcgggcgatgggttccgctacgacacggcggcgattcaggccgctgtagacgcctgcgcggcggcgggcgggggccgcgttcttctcccggcgccgggcaactacctgacagcgaccgtccaactccgctcgcgggtggtgctggaggtgccccccggagcgcggcttctgggcgggaccaggcaggcggactacccgcccgagtcgcgccggtggtacgtcgttctggccgagaacaccacgggcgccggcatcacggggggaggcgagatcaacggccagggcggggcatttgttgtcaggcccagcgaggtgaagaacgtcatggtgagctggaatgccaccggcgattgcctgggcgatgagtgccggccgcggcttgttggcttcattgactctaaggatgttaggatccacgacatcacactcaaccagcccgcctactggtgtcttcaccttgtcagatgtgacaacacagtcatccacaatgtgtcgatatttggagattttaaaactcccaacaatgatggcattgacattgaggattctaacaacactgtcataactgattgccacatagacaccggagacgatgctataagcccaaagtcgacaactggaccagtttataacttgacggcaacaaactgttggatgcggactaaatcttgtgctatcaagtttggaagtgcaagcttcttcgacttcaaaagactggtttttgacaacattacaatagttgattcacatcgaggacttgggatgcagatccgggatggagggaatgtgaatgatgtggtgttttcaaacattaaaatgaggaccaggtactaccatcctttatggtggggaagagccgaaccaatctatatcacaacttgcccaaggcacccagattcaaaagaaggcgccatttcagacataagattcatcaacatctcatcggtatcagaaaatggagtttttctggctggatctaagcatgggctgctccgcaacctgaaattcaagaacatagaccttacctacaagcgttggacaaactacacgggagggctctatgattacaggcctgggtgccaggagatggtgaagcacaagactggtggcatgatgctggagcatatctccggtctggagattgacaacgtgaggatgagatgggcgagaggaagcctgaagggctggaatgttaaccctatcctcttccggccatcaaccatcgataatctgtctttccatgactggcagtcagtggatgttcagtagatttaagtggcacagttgtattacgtgtgtatctatcagaataaaggggtgattctttttattc

SEQ ID NO: 2603 - protein, 457 aa, Zea mays
  misc_feature (54)..(397): Pfam Name: Glyco_hydro_28 Pfam Description: Glycosyl hydrolases family 28
  misc_feature: Ceres Clone ID no. 236513
  misc_feature: Bit score of 1158.1 for HMM based on sequences of Figure 38
  misc_feature: Functional Homolog Of SEQ ID NO. 2599
  misc_feature: in Figure 38
MTSPIQLAAAPLLLLVVVVAGTRSSRIFSVADYGAAGDGFRYDTAAIQAAVDACAAAGGGRVLLPAPGNYLTATVQLRSRVVLEVPPGARLLGGTRQADYPPESRRWYVVLAENTTGAGITGGGEINGQGGAFVVRPSEVKNVMVSWNATGDCLGDECRPRLVGFIDSKDVRIHDITLNQPAYWCLHLVRCDNTVIHNVSIFGDFKTPNNDGIDIEDSNNTVITDCHIDTGDDAISPKSTTGPVYNLTATNCWMRTKSCAIKFGSASFFDFKRLVFDNITIVDSHRGLGMQIRDGGNVNDVVFSNIKMRTRYYHPLWWGRAEPIYITTCPRHPDSKEGAISDIRFINISSVSENGVFLAGSKHGLLRNLKFKNIDLTYKRWTNYTGGLYDYRPGCQEMVKHKTGGMMLEHISGLEIDNVRMRWARGSLKGWNVNPILFRPSTIDNLSFHDWQSVDVQ

SEQ ID NO: 2604 - protein, 452 aa, Oryza sativa subsp. japonica
  misc_feature (53)..(390): Pfam Name: Glyco_hydro_28 Pfam Description: Glycosyl hydrolases family 28
  misc_feature: Public GI ID no. 115479865
  misc_feature: Bit score of 1128.2 for HMM based on sequences of Figure 38
  misc_feature: Functional Homolog Of SEQ ID NO. 2599
  misc_feature: in Figure 38
MASPLLLLLPLAVSSLLLPFAAAARVFSVADYGAAGDGARYDTGAIQAAVDACAAAGGGRVLLPAPGDYLTATVHLRSRVVLDVAPGARLLGGTRQADYPPESRRWYVVLAENTTGAGVTGGGEINGQGGAFVVTPNPQKNIMVSWNATGDCEGDECRPRLVGFIDSKDVTIHDITLNQPAYWWCDNTMIHNVSIYGDFDTPNNDGIDIEDSNNTAITHCHIDTGDDAICPKSTTGPVYNLTATNCWIRTKSCAIKFGSASFFDFKKLVFDNITIVDSHRGLGMQIRDGGNVSDVVFSNIKMSTRYYHPLWWGRAEPIYITTCPRHPDSKEGTISDIQFINISSVSENGVFLAGSKHGLLRNLKFKNVDLTYKRWTNYSGGLYDYRPGCQKMVKHRTGGMMLEHISGLEIDNVRMRWSRGSLKGWDVDPLLFQPSTVDKLSFHDWQSLAVSR

SEQ ID NO: 2605 - DNA, 1656 bp, Gossypium hirsutum
  misc_feature: Ceres Clone ID no. 1857333
  misc_feature: Encodes the peptide sequence at SEQ ID NO. 2606
tttttactaaacgccaatttcttggcttggcttggccatttccatttcctaatcagttgaccagatccaaaagaaatgggtggtggagcagcagcagctccaattccccgtctaacagcgatcgctttcctattcctcctccccatcgtcattcaatcacatactccctctatctccgtcagagacttcggagccaccggagacggcaaacactacgacacagccgccatccagtcggccatcggcagctgccgcactaaaccttgctacgtgaccttcccaacaggcacatacctaacggccaccatcttcctcaaatccaacgtgattttggacatcccgaaaggctccaccatcttgggtgggaccaaattggaagactacccgaaagagttcgataggtggtatgtgatattggcagagaatgcaagggatgtagggataacaggtggaggggtggtggatgggcaggggttggagttcgtggtgaagttcgacgaaagaaaaaacgtgatggtgagctggaaccagacaggggcttgctccggcgatgagtgtaggccaaggttggtgggttttcttgactctaccaacgtcagagtttggaatgttaccttcaggcaaccggcctattggtgcttgcacatagttcgatgtgaaaacacatctatccatgatgtttcaatctatggagatttcaatacacctaacaatgatggaatagacattgaggattcaaataatacagtgattacaagatgccacattgatacaggagatgatgctatatgccccaagacatacacttcccctctatataacttaactgcaaccaactcctggattcgaaccaaatcttctgcaattaaacttggaagtgctagctggtttgagttaaacaatttggtctttgacaacattactattgtagattctcatagagggctcgcattgcagatacgtgatggaggaaatgtaagtgacattactttctcaaacataaacatcagcacgagatactatgatccgtcatggtgggggagggcggaaccgatttatgtcacgacttgcccgcggcactcaaattcatcagagggttcaatctccaacttgaacttcgtaaacatctccgcagtttccgaaaacggtatcttcttatcaggttctaaaggtggactgctaagggatttgagattcatcaacattaacttaacatacaaacgatggacgaaatacatgggagggttggttgactatcggccgggctgtcagggacttgtgaaccacagcacagcagggattataatggaacatattgatggtttggatgttgagaatgtaaatatgagatggttcgatggacgaacggtgcaatgggataatcctttggacttcaggccttctactgtgaataacatttccttgcttaatttccattctggtgtctacaaacagggaagggggtcatcggagcagattcccctttttggctcaaattgaattcatcattgaattcatcatttttacacgaattgtatgcgtggacaaacctttgaaggtgtagttttacttgtaaactctttatcagcaaagctatttaaaacaaatgattgattcactctttcactttttaggagtaattaatcatgtttgctc

SEQ ID NO: 2606 - protein, 474 aa, Gossypium hirsutum
  misc_feature (59)..(406): Pfam Name: Glyco_hydro_28 Pfam Description: Glycosyl hydrolases family 28
  misc_feature: Ceres Clone ID no. 1857333
  misc_feature: Bit score of 1142.7 for HMM based on sequences of Figure 38
  misc_feature: Functional Homolog Of SEQ ID NO. 2599
  misc_feature: in Figure 38
MGGGAAAAPIPRLTAIAFLFLLPIVIQSHTPSISVRDFGATGDGKHYDTAAIQSAIGSCRTKPCYVTFPTGTYLTATIFLKSNVILDIPKGSTILGGTKLEDYPKEFDRWYVILAENARDVGITGGGVVDGQGLEFVVKFDERKNVMVSWNQTGACSGDECRPRLVGFLDSTNVRVWNVTFRQPAYWCLHIVRCENTSIHDVSIYGDFNTPNNDGIDIEDSNNTVITRCHIDTGDDAICPKTYTSPLYNLTATNSWIRTKSSAIKLGSASWFELNNLVFDNITIVDSHRGLALQIRDGGNVSDITFSNINISTRYYDPSWWGRAEPIYVTTCPRHSNSSEGSISNLNFVNISAVSENGIFLSGSKGGLLRDLRFININLTYKRWTKYMGGLVDYRPGCQGLVNHSTAGIIMEHIDGLDVENVNMRWFDGRTVQWDNPLDFRPSTVNNISLLNFHSGVYKQGRGSSEQIPLFGSN

SEQ ID NO: 2607 - DNA, 1425 bp, Populus balsamifera subsp. trichocarpa
  misc_feature: Ceres Annot ID no. 1528328
  misc_feature: Encodes the peptide sequence at SEQ ID NO. 2608
atgaccactccaattctccaattaatcttccttttaatcctctcccctctccgccaattacccccctccaaaccagcaacccccaccagaatccaactcccccacccaactcccaccaccctctccgtcaccgacttcggtgccatcggagacggcatccactacgacacagaagccattcaatcaaccattaactcctgtcccaccaccccaccaaccaaagcatgtcacgtcaacttcccacctgggatctacctaacagcaaccatccacttaaaatccaacgttgttctaaacatccaagaaggagcaaccttgctaggcggcacaaaactggaggactacccaaaagagtttaacagatggtatgttgttttagcagagaacgcgagtgatgtagggataactggaggtggggttgttgatggtcaaggattgaagtttgttaagaggtttaatgagagaaagaatgtgatggtgagttggaattctactggggcttgcttgggtgatgagtgtaggccaagactggttggcttcattggatgtacaaacgtcaaggtttggaatgttaggttaagtgagccagcttattggtgtttgcacatagtacagtgccttaatacacacatttctgacgtttccatatatggtgactttaattcacctaataatgatgggatagatatagaggattctaataatacacttattacaagatgtcatatcgacaccggagatgatgctatttgtccgaagacatacaccggtccgatttataatttgactgctacagactgttggattcgaacaaaatcttcagcgatcaagcttggtagtgctagctggtttgagttcaagggtctggtgtttgacaatatcactattgtagattctcatagaggattgggactgcagatacgtgatggaggaaatgtaagtgacatcaccttctcaaacataaatattagcacaagatactatgatccatcatggtggggtagagcagagcctatttatgtgacaacctgtccgcgacactcaagttcaaaagagggctcaatatctaatctacaattcatcaacataacgacgaattctgaaaatggtgtattcttgtcaggctctaaaggtggcctgctgagcaatctgagattcatcaacatgaatctgactttcagaagatggacaacttatccaggtggcttggtagactacagacctggatgccagggtcttgttaatcacagtgcagccgggattatcatggaacatatcgagggcttcgaggttgagaacgtaaatatgagatggtctgattatcaaaatgagccgtgggataatcccttggatttcagaccttcgactgtgaataacatttcttttctcaatttccattctgctttgtataaacaaatgaaatag

SEQ ID NO: 2608 - protein, 474 aa, Populus balsamifera subsp. trichocarpa
  misc_feature (67)..(419): Pfam Name: Glyco_hydro_28 Pfam Description: Glycosyl hydrolases family 28
  misc_feature: Ceres Annot ID no. 1528328
  misc_feature: Bit score of 1170.4 for HMM based on sequences of Figure 38
  misc_feature: Functional Homolog Of SEQ ID NO. 2599
  misc_feature: in Figure 38
MTTPILQLIFLLILSPLRQLPPSKPATPTRIQLPHPTPTTLSVTDFGAIGDGIHYDTEAIQSTINSCPTTPPTKACHVNFPPGIYLTATIHLKSNVVLNIQEGATLLGGTKLEDYPKEFNRWYVVLAENASDVGITGGGVVDGQGLKFVKRFNERKNVMVSWNSTGACLGDECRPRLVGFIGCTNVKVWNVRLSEPAYWCLHIVQCLNTHISDVSIYGDFNSPNNDGIDIEDSNNTLITRCHIDTGDDAICPKTYTGPIYNLTATDCWIRTKSSAIKLGSASWFEFKGLVFDNITIVDSHRGLGLQIRDGGNVSDITFSNINISTRYYDPSWWGRAEPIYVTTCPRHSSSKEGSISNLQFINITTNSENGVFLSGSKGGLLSNLRFINMNLTFRRWTTYPGGLVDYRPGCQGLVNHSAAGIIMEHIEGFEVENVNMRWSDYQNEPWDNPLDFRPSTVNNISFLNFHSALYKQMK

SEQ ID NO: 2609 - protein, 490 aa, Arabidopsis thaliana
  misc_feature (69)..(417): Pfam Name: Glyco_hydro_28 Pfam Description: Glycosyl hydrolases family 28
  misc_feature: Public GI ID no. 18410809
  misc_feature: Bit score of 1104.7 for HMM based on sequences of Figure 38
  misc_feature: Functional Homolog Of SEQ ID NO. 2599
  misc_feature: in Figure 38
MMGSILLLLLFFSLVQSRSDTSYSKIQLPGDSLTLSVTDFGATGDGINYDTSAIQSTIDACNRHYTSFSSICRVVFPSGNYLTAKLHLRSGVILDVTENAVLLGGPRIEDYYPAETSSDWYVVVANNATDVGITGGGAIDGQGSKFVVRFDEKKNVMVSWNQTGACLGDECRPRLVGFVDSINVEIWNITLREPAYWCLHIVRCENTSVHDVSILGDFNTPNNDGIDIEDSNNTVITRCHIDTGDDAICPKTYTGPLYNLTATDCWIRTKSSAIKLGSASWFDFKGLVFDNITIFESHRGLGMQIRDGGNVSDVTFSNINISTRYYDPSWWGRAEPIYITTCPRDSSAKEGSISNLLFVNITIDSENGVFLSGSPNGLLSDIKFKNMNLTFRRWSNYSAGLVDYRPGCQGLVNHRATSGIIMEHVNGFRVENVDLKWSDDDDVNAAWNVPLEFRPSTVNNVSFVGFTSGLYTKLFESDYVMVGENNIAFA

SEQ ID NO: 2610 - DNA, 1624 bp, Panicum virgatum
  misc_feature: Ceres Clone ID no. 1905277
  misc_feature: Encodes the peptide sequence at SEQ ID NO. 2611
ccgatccagctgaagaaaattaagcaacttggagcagtttccgtgcaattgttacactagcgccgcgcatgatcctccaagccgcaaagattccaatttgatagcgtaatttttgatttctcggagccagacgtcggaatggcgtctcctccgcttcagttcgcggccgcgcccttgctgctgctgctgctgctggtagcagtcgtcccggccgcacggtccagccgcatcttctccgtgactgactacggcgcggcgggcgatgggtcccgctacgacacggtggcaattcaggccgccgtggacgactgcgcggcggcgggcgggggccgcgtcctcctcccggcgccgggcaactacctgacggcgacggtccacctccgctcgcgggtggtgctggaggtggcccccggcgcgcggctgctgggcggaaccaggcaggcggactacccgcccgaatcgcgccgttggtacgtcgtcctggccgagaacaccacgggggccggcatcacgggcggcggcgagatcaacggccagggcggggcgttcgtggtcacgcccagcgaggtgaagaacgtcatggtgagctggaacgccaccggcgattgcctgggcgacgagtgccggccgcggctcgtcggtttcatcgactccaaggatgttaggatccacgacatcacactcaaccagcccgcctactggtgtcttcaccttgtcagatgtgacaacacagtgatccgcaatgtgtctatatttggggattttaagagtcccaacaatgatggcattgacattacggattctaacaacactgtcataaccgattgccacatagacaccggagacgatgctttatgcccaaagtcatccgcggggcctgtttacaacttgacagccacaaactgttggattcgaactaaatcttgtgctatcaagtttggaagtgcaagcttcttcaacttcaataagctggtcttcgacaacattacaatagttgattcacatcgaggacttgggatgcagattcgggatggaggaaatgtgagtgatgtgctgttttcaaacatcaaaatgagcaccagatactaccatcctttatggtggggaagagccgaaccaatctacattacaacttgctcaaggtacccggattcaaaagaaggtaccatttcagacataagattcatcaacatctcatcagtatcagaaaacggagttttcctggctggatcaaagcacgggctgctccgcaatctgaaattcaagaatgtcgacctgacctacaagcgttggacaaactacccgggaggcctgtatgattacagacctggatgcgaaaagatggttaagcataaaactggtggcatgatgctggagcacatctccggcctggagatcgacaacgtgaggatgagatgggcgagaggaaacctgaaaggctgggacgtcaaccccatccttttccggccgtcgaccatcgacaagctgtctttccatgactggcagtcagtggaagttcagtgaatttgcccttccccaattgtacctgtgtatctgtatcacgatgaataaaaggggtgattctttttgcgaaatatgctaataagagatcccaattcccaac

SEQ ID NO: 2611 - protein, 461 aa, Panicum virgatum
  misc_feature (58)..(394): Pfam Name: Glyco_hydro_28 Pfam Description: Glycosyl hydrolases family 28
  misc_feature: Ceres Clone ID no. 1905277
  misc_feature: Bit score of 1147.3 for HMM based on sequences of Figure 38
  misc_feature: Functional Homolog Of SEQ ID NO. 2599
MASPPLQFAAAPLLLLLLLVAVVPAARSSRIFSVTDYGAAGDGSRYDTVAIQAAVDDCAAAGGGRVLLPAPGNYLTATVHLRSRVVLEVAPGARLLGGTRQADYPPESRRWYVVLAENTTGAGITGGGEINGQGGAFVVTPSEVKNVMVSWNATGDCLGDECRPRLVGFIDSKDVRIHDITLNQPAYWCLHLVRCDNTVIRNVSIFGDFKSPNNDGIDITDSNNTVITDCHIDTGDDALCPKSSAGPVYNLTATNCWIRTKSCAIKFGSASFFNFNKLVFDNITIVDSHRGLGMQIRDGGNVSDVLFSNIKMSTRYYHPLWWGRAEPIYITTCSRYPDSKEGTISDIRFINISSVSENGVFLAGSKHGLLRNLKFKNVDLTYKRWTNYPGGLYDYRPGCEKMVKHKTGGMMLEHISGLEIDNVRMRWARGNLKGWDVNPILFRPSTIDKLSFHDWQSVEVQ

SEQ ID NO: 2612 - protein, 314 aa, Zea mays
  misc_feature (1)..(254): Pfam Name: Glyco_hydro_28 Pfam Description: Glycosyl hydrolases family 28
  misc_feature: Public GI ID no. 194697548
  misc_feature: Bit score of 650.7 for HMM based on sequences of Figure 38
  misc_feature: Functional Homolog Of SEQ ID NO. 2599
MVSWNATGDCLGDECRPRLVGFIDSKDVRIHDITLNQPAYWCLHLVRCDNTVIHNVSIFGDFKTPNNDGIDIEDSNNTVITDCHIDTGDDAISPKSTTGPVYNLTATNCWMRTKSCAIKFGSASFFDFKRLVFDNITIVDSHRGLGMQIRDGGNVNDVVFSNIKMRTRYYHPLWWGRAEPIYITTCPRHPDSKEGAISDIRFINISSVSENGVFLAGSKHGLLRNLKFKNIDLTYKRWTNYTGGLYDYRPGCQEMVKHKTGGMMLEHISGLEIDNVRMRWARGSLKGWNVNPILFRPSTIDNLSFHDWQSVDVQ

SEQ ID NO: 2613 - DNA, 1587 bp, Populus balsamifera subsp. trichocarpa
  misc_feature: Ceres Annot ID no. 1474898
  misc_feature: Encodes the peptide sequence at SEQ ID NO. 2614
atgaccactccaattctccaattaatcttccttttaatcctctcccctctccgccaattacccccctccaaaccagcaacccccaccagaatccaactcccccacccaactcccaccaccctctccgtcaccgacttcggtgccatcggagacggcatccactacgacacagaagccattcaatcaaccattaactcctgtcccaccaccccaccaaccaaagcatgtcacgtcaacttcccacctgggatctacctaacagcaaccatccacttaaaatccaacgttgttctaaacatccaagaaggagcaaccttgctaggcggcacaaaactggaggactacccaaaagagtttaacagatggtatgttgttttagcagagaacgcgagtgatgtagggataactggaggtggggttgttgatggtcaaggattgaagtttgttaagaggtttaatgagagaaagaatgtgatggtgagttggaattctactggggcttgcttgggtgatgagtgtaggccaagactggttggcttcattggatgtacaaacgtcaaggtttggaatgttaggttaagtgagccagcttattggtgtttgcacatagtacagtgccttaatacacacatttctgacgtttccatatatggtgactttaattcacctaataatgatgggatagatatagaggattctaataatacacttattacaagatgtcatatcgacaccggagatgatgctatttgtccgaagacatacaccggtccgatttataatttgactgctacagactgttggattcgaacaaaatcttcagcgatcaagcttggtagtgctagctggtttgagttcaagggtctggtgtttgacaatatcactattgtagattctcatagaggattgggactgcagatacgtgatggagaaatgcaaatgctggaagacggcaaatgctctcaatcgtttgttagattatacgtccttttcaagaacaggcttgcgtatacaaggctttccattattgtaaggatgacaacttttgcaggaaatgtaagtgacatcaccttctcaaacataaatattagcacaagatactatgatccatcatggtggggtagagcagagcctatttatgtgacaacctgtccgcgacactcaagttcaaaagagggctcaatatctaatctacaattcatcaacataacgacgaattctgaaaatggtgtattcttgtcaggctctaaaggtggcctgctgagcaatctgagattcatcaacatgaatctgactttcagaagatggacaacttatccaggtggcttggtagactacagacctggatgccagggtcttgttaatcacagtgcagccgggattatcatggaacatatcgagggcttcgaggttgagaacagtcataactgtaaaatcaaggctttaaaggagcatggtaggaaggtggatgagtatattcaacatctgcaagaaaagacagaggagcatggcaagaagctcgatcaaatcaattcacaattagaagctataatggctatgttgagggcaaattcaggaagcctataa

SEQ ID NO: 2614 - protein, 528 aa, Populus balsamifera subsp. trichocarpa
  misc_feature (67)..(459): Pfam Name: Glyco_hydro_28 Pfam Description: Glycosyl hydrolases family 28
  misc_feature: Ceres Annot ID no. 1474898
  misc_feature: Bit score of 1002.5 for HMM based on sequences of Figure 38
  misc_feature: Functional Homolog Of SEQ ID NO. 2599
MTTPILQLIFLLILSPLRQLPPSKPATPTRIQLPHPTPTTLSVTDFGAIGDGIHYDTEAIQSTINSCPTTPPTKACHVNFPPGIYLTATIHLKSNVVLNIQEGATLLGGTKLEDYPKEFNRWYVVLAENASDVGITGGGVVDGQGLKFVKRFNERKNVMVSWNSTGACLGDECRPRLVGFIGCTNVKVWNVRLSEPAYWCLHIVQCLNTHISDVSIYGDFNSPNNDGIDIEDSNNTLITRCHIDTGDDAICPKTYTGPIYNLTATDCWIRTKSSAIKLGSASWFEFKGLVFDNITIVDSHRGLGLQIRDGEMQMLEDGKCSQSFVRLYVLFKNRLAYTRLSIIVRMTTFAGNVSDITFSNINISTRYYDPSWWGRAEPIYVTTCPRHSSSKEGSISNLQFINITTNSENGVFLSGSKGGLLSNLRFINMNLTFRRWTTYPGGLVDYRPGCQGLVNHSAAGIIMEHIEGFEVENSHNCKIKALKEHGRKVDEYIQHLQEKTEEHGKKLDQINSQLEAIMAMLRANSGSL

SEQ ID NO: 2615 - protein, 460 aa, Physcomitrella patens subsp. patens
  misc_feature (59)..(400): Pfam Name: Glyco_hydro_28 Pfam Description: Glycosyl hydrolases family 28
  misc_feature: Public GI ID no. 168063573
  misc_feature: Bit score of 731.2 for HMM based on sequences of Figure 38
  misc_feature: Functional Homolog Of SEQ ID NO. 2599
MKNSFSLAASLPFEIRPSFQALKAEFEDGRFVCRVSDFGATGNGEVYDTSAIQSSIDYCANQGGGVVYVSPGENLTGTLYLKSNITLWVDKGATIVGSARQEDFLAHWTRWYTILAEDAENVELTGGGIVTGQGLKFVVEFKEEKNIMVSWNVTGDCVGDECRPRLVGFINCKNVHIWNVFLREPAYWCLHIVKSNIISIHDVSMHGDFNSPNTDGIDIDSSNNTVIKDCHIDTGDDAICSKSELGPLYNLTVTNCWIRTKSCAVKLGSMTNFNLGNLHFEQLVIVDSHRGLGIQLRDSGNINNVTYANIQMSTRYYHPSWWGLAEPIYVSACPRTPDTVLGSVNNVHYMNITTTSENGIFLSGLEESFLKGLHFRNVKMTLARSTNFTGGYHDYRPGCQGLVTHRMSGLFMEYVKDIWMQEVFVQWKGSNVSDWGLPIDFTPSTVGNMHLMNYENTYTV

SEQ ID NO: 2616 - protein, 328 aa, Vitis vinifera
  misc_feature (15)..(248): Pfam Name: Glyco_hydro_28 Pfam Description: Glycosyl hydrolases family 28
  misc_feature: Public GI ID no. 157348638
  misc_feature: Bit score of 537.2 for HMM based on sequences of Figure 38
  misc_feature: Functional Homolog Of SEQ ID NO. 2599
MVSWNETGACLGDECRPRLVGFLGCRNVRVWNIRLNEPAYWCLHLVGCNNTSIHDVSIYGDFNTPNNDGIDIEDSNNTVITRCSISTGDDSICPKTSNGPLYNLTVTNCWLRSRSSAIKLGSGSFYDFKGLVFDNITIDDSHRGLGMQIRDGGDVSDVTFSNMNIKTRYYEPVLWWGRAEPIYITTCPRDSNSKEGSISNIRFINISATSENGVFLSGSKAGLLSNLRFQNVNFTYRRWTNFPDDLVDYRPGCRGLVKHSPAGMIMEHIDGLELENVNMRWSGVIQNKRWNNPLDFLPSTVNNISFLNFQSGSDSVREIRAPREGSIV

SEQ ID NO: 2617 - protein, 325 aa, Arabidopsis thaliana
  misc_feature (69)..(324): Pfam Name: Glyco_hydro_28 Pfam Description: Glycosyl hydrolases family 28
  misc_feature: Public GI ID no. 17473561
  misc_feature: Bit score of 505.2 for HMM based on sequences of Figure 38
  misc_feature: Functional Homolog Of SEQ ID NO. 2599
MMGSILLLLLFFSLVQSRSDTSYSKIQLPGDSLTLSVTDFGATGDGINYDTSAIQSTIDACNRHYTSFSSICRVVFPSGNYLTAKLHLRSGVILDVTENAVLLGGPRIEDYYPAETSSDWYVVVANNATDVGITGGGAIDGQGSKFVVRFDEKKNVMVSWNQTGACLGDECRPRLVGFVDSINVEIWNITLREPAYWCLHIVRCENTSVHDVSILGDFNTPNNDGIDIEDSNNTVITRCHIDTGDDAICPKTYTGPLYNLTATDCWIRTKSSAIKLGSASWFDFKGLVFDNITIFESHRGLGMQIRDGGKQVSSFLWLHTTQKLM

SEQ ID NO: 2618 - DNA, 1504 bp, Panicum virgatum
  misc_feature: Ceres Clone ID no. 1797459
  misc_feature: Encodes the peptide sequence at SEQ ID NO. 2619
atccagatcctccagtcgcccacggcccaccctccgccctctcctcttccttccttcctacctctccctgttcgtgttcgtctcggcttccggtcgctgattccgcgcggagattctgtggtggcggtgctcgctcgctctctcgcgcgcgcttgtggtttcgcgtgcatggggctcgacgtggcggagatcgggatggggctggatctggggctcgacctcaggctcttcgccgcgcggagcgccggcgggatggcggcggccgcggcaaagggcgcgcccgcgggaatcgaggcctgcatcaggagcctcgaggaggagcgccgcaagatcgaggtcttcaggcgcgagctcccgctctgcgtccgcctcctcgccgacgtgatcgaggagttgaaggaggaggccgcgaggaaaggcggcgattcggagttgaggccggacgacggcgacaagaggaaatggatgagcaccgcgcagctctgggtggactccgacgccacatccaagtccgagaaagagcaacgaaatgaggtgacctcgccggagcccaagttgctcggtggccccatgccgatacgggctgttccggcggtgccgctgccgcctccaccgtgcttcaggaaggatgacaacgcttcgggaactgccggattgcccggtctgtcgttgctgccactggctgcaaagacatcggtctctccggtccctgccgttgatgaacaccggcagaacgctggcgccgcaagattgtctgccaccatgtcaccatctggccctggactcaacctgcatgctcagactcagcagcagcaacaacaggcgaggaagacaaggcggtgctggtcgccggagcttcaccggcagtttgttgctgccttgcatcaactcggtggcccacaagttgctactccgaagcagatcagagaggtgatgcaagtggacgggcttacaaacgacgaagtgaaaagccatctccagaagtaccggctgcacaacagaagatcgcccggcgtggctccggtgagccagtcgattgtgttggtgggtggcctctggggttctcaggagcaaagcagctcacagtcagggtctcctcagggcccccttcagttctctgggtcagggacggccatctctgcagccaccgtcggcggcgacggcagcagcagcgacgaagatgacaagtctgatgaaggctacagccggaaatgattgcaaggctgcgtttgcagaagatcggttgagagtgtagatgtagcatcgcggctttgcgcatcggtggcaataacagattcgtcagtcaggagaggctgtagtgcagccaggccatgcatacagggagattgggcggtgcgtgccccagagatgaacttatcatgagtttggttgttggttgtcatgtacatgaaaagctgataccagttttcatgaggcttcttgactttagttcccgggcagatccaaattttcgccctgagaattatatacatgcgagattcac

SEQ ID NO: 2619 - protein, 348 aa, Panicum virgatum
  misc_feature (223)..(274): Pfam Name: Myb_DNA-binding Pfam Description: Myb-like DNA-binding domain
  misc_feature: Ceres Clone ID no. 1797459
  misc_feature: Bit score of 836.7 for HMM based on sequences of Figure 34
  misc_feature: Functional Homolog Of SEQ ID NO. 2619
  misc_feature: in Figure 34
MGLDVAEIGMGLDLGLDLRLFAARSAGGMAAAAAKGAPAGIEACIRSLEEERRKIEVFRRELPLCVRLLADVIEELKEEAARKGGDSELRPDDGDKRKWMSTAQLWVDSDATSKSEKEQRNEVTSPEPKLLGGPMPIRAVPAVPLPPPPCFRKDDNASGTAGLPGLSLLPLAAKTSVSPVPAVDEHRQNAGAARLSATMSPSGPGLNLHAQTQQQQQQARKTRRCWSPELHRQFVAALHQLGGPQVATPKQIREVMQVDGLTNDEVKSHLQKYRLHNRRSPGVAPVSQSIVLVGGLWGSQEQSSSQSGSPQGPLQFSGSGTAISAATVGGDGSSSDEDDKSDEGYSRK

SEQ ID NO: 2620 - DNA, 1396 bp, Zea mays
  misc_feature: Ceres Clone ID no. 240112
  misc_feature: Encodes the peptide sequence at SEQ ID NO. 2621
agatcccctcacagtcatcctccacccaccccacccaccgcctccgcctctctctctctctcgtttgttcgtctcggcttccggtcgccgattcttctctgcgcaaaagattcctggtggtggtgcccgtaccttgctccacgcctcgctcgcgtcgcgtgcatggggctggacgtcggcggcatcgggatgggcctggatctgggtctggacctcgggctgttcgccgcgcggagcgccggagggatggcggccgcggccaagggtgcgccggcggagatcgagtcctgcatcaggagcctcgaggaggagcgccggaagatcgaggtgttcaggcgcgagctcccgctctgcgtgcgtctcctcgccgatgtaatcgacgaattgaaggatgaggccgccaagagaggcggagacgcggaggccaaggccgacgacggcgataagcggaaatggatgagcaccgctcagctgtggctcgacagcgacgccaaatccgacgagtctgacaaagagcaactgagtgaaatcacttcgccggagcccaagttgctcggtggcgcacccatgcccataagggccgttgcggcggtgccacccctgccgcctccattcttcaggagagaagacagctctgccggcagtggtctgtcgctggtaccacccgcagctaagccgccgattcctcccatgtctgccagcgacaacgcgagcggcagattctgtgccactatgccaccgtctggctctggggccaacttgcactctcaggctcagcagcaagccaggaaggcgaggcggtgctggtcgccggagcttcaccggctgtttgttgccgccttgcatcaactcggcggccctcaagttgctactccgaagcagatcagggaggtgatgaaggtggacgggcttacaaacgatgaagtgaaaagccatctccagaagtaccggctgcacaacagaagatcccccggcgtcgtggctccggtgagccagtcggtcatgctggcgggcggcctctgggctcctcctcatcaggagcaaagcagctcgcagtccgggtctccccagggcccgcttcagttctctggatccggtgtagcggccaccgtcggcggcgatagcagcagcagcgacgaggacgacaagtccgaaggctacagccggaaatacgtgtaaaggccgcgttcgacggatgagagtgtagagatagcgtcgcggcttctgcttgcccgtctgtggcaataacagattcatcagtcttgagagaggttgtagtgcgtgcgcccaagagctcaactgatcatgggttggattgtttgtttgtcatgtacgtacatggaaagctgatggcttcctgacttttaatttctgggcaggtcccaaaattttcgac

SEQ ID NO: 2621 - protein, 338 aa, Zea mays
  misc_feature (212)..(263): Pfam Name: Myb_DNA-binding Pfam Description: Myb-like DNA-binding domain
  misc_feature: Ceres Clone ID no. 240112
  misc_feature: Bit score of 806.6 for HMM based on sequences of Figure 34
  misc_feature: Functional Homolog Of SEQ ID NO. 2619
  misc_feature: in Figure 34
MGLDVGGIGMGLDLGLDLGLFAARSAGGMAAAAKGAPAEIESCIRSLEEERRKIEVFRRELPLCVRLLADVIDELKDEAAKRGGDAEAKADDGDKRKWMSTAQLWLDSDAKSDESDKEQLSEITSPEPKLLGGAPMPIRAVAAVPPLPPPFFRREDSSAGSGLSLVPPAAKPPIPPMSASDNASGRFCATMPPSGSGANLHSQAQQQARKARRCWSPELHRLFVAALHQLGGPQVATPKQIREVMKVDGLTNDEVKSHLQKYRLHNRRSPGVVAPVSQSVMLAGGLWAPPHQEQSSSQSGSPQGPLQFSGSGVAATVGGDSSSSDEDDKSEGYSRKYV

SEQ ID NO: 2622 - DNA, 1026 bp, Sorghum bicolor
  misc_feature: Ceres Annot ID no. 8632546
  misc_feature: Encodes the peptide sequence at SEQ ID NO. 2623
atggggctggacgtcggtgagatcgggatgggcctggatctgggtctcgacctcaggctgttcgccgcgcggacagccggcgggatggcggcggccgcggccaagggtgcgccggcggggatcgagtcctgtatcaggagcctcgaggaggagcgcaagaagatcgaggtgttcaggcgcgagctcccgctctgcgcgcgcctcctcgccgacgtgatcgacgagttgaaggaggaggccgccaagagaggcggaggagacgcggacgcgaaggcggacgacggcgacaagcggaaatggatgagcaccgctcagttgtgggtggacagcgaagccaaatcggacgagtctgataaggagcatcagagtgaatcacctcgccggagcccaagttgcttgtggccacccatgcccataagggccgttgcggctgtaccacccctgccgccgccgttcttcaggagagaagacagctctgccggcacttgtctgtcgttggtatcgccggcatctaaggccccgatttctcccgtggctaccagcgataacgccagcggcagattttgtcccaccatgccaccatctggctcttctggggtcaccttgcactctcaggctcagcagcaggctagcaggaaggcgaggcggtgctggtcgccggagcttcaccggcagttcgtcgccgctttgcatcaactcggcggccctcaagttgctactccgaaacaaatcagggaggtgatgcaagtggacggtcttacaaatgatgaagtgaaaagccatctccagaagtaccggctgcacaacagaagatcccccggtgttgctccggtgagccagccgatcatgttggtgggtggcctctgggctccacaggagcaaagcagctccggttcaccccagggtccgcttcagttctcgggatcaggtgtggccatttctacggccaccgtcggcggtgacagcagcggcagcagcagcgacgaagacgacaagtccgaaggctacagccggaaatgcgtgtaa

SEQ ID NO: 2623 - protein, 341 aa, Sorghum bicolor
  misc_feature (215)..(266): Pfam Name: Myb_DNA-binding Pfam Description: Myb-like DNA-binding domain
  misc_feature: Ceres Annot ID no. 8632546
  misc_feature: Bit score of 806.4 for HMM based on sequences of Figure 34
  misc_feature: Functional Homolog Of SEQ ID NO. 2619
  misc_feature: in Figure 34
MGLDVGEIGMGLDLGLDLRLFAARTAGGMAAAAAKGAPAGIESCIRSLEEERKKIEVFRRELPLCARLLADVIDELKEEAAKRGGGDADAKADDGDKRKWMSTAQLWVDSEAKSDESDKEHQSESPRRSPSCLWPPMPIRAVAAVPPLPPPFFRREDSSAGTCLSLVSPASKAPISPVATSDNASGRFCPTMPPSGSSGVTLHSQAQQQASRKARRCWSPELHRQFVAALHQLGGPQVATPKQIREVMQVDGLTNDEVKSHLQKYRLHNRRSPGVAPVSQPIMLVGGLWAPQEQSSSGSPQGPLQFSGSGVAISTATVGGDSSGSSSDEDDKSEGYSRKCV

SEQ ID NO: 2624 - protein, 348 aa, Oryza sativa subsp. japonica
  misc_feature (226)..(277): Pfam Name: Myb_DNA-binding Pfam Description: Myb-like DNA-binding domain
  misc_feature: Public GI ID no. 115455537
  misc_feature: Bit score of 780.8 for HMM based on sequences of Figure 34
  misc_feature: Functional Homolog Of SEQ ID NO. 2619
  misc_feature: in Figure 34
MGLDVGEIGMGLDLSLDLKMFAARSAVRMAAAAAKEATGVEACIRSLEEERRKIEMFRRELPLCARLLADVIELMKEEAGKRRKDGDDAEAKAEDGDKTKWMSTAQLWVDSRGSDADSENDRRSGSTSPASRLLGGAEESSSRAVAPPPYFRREERVVLRPAMPLLPPASHRSPPPAAAAAATAAGDDHRHVVASSFATAVPSPVPAALSLQAQAQQQQQQARKSRRCWSPELHRQFVAALQQLGGPQVATPKQIREVMKVDGLTNDEVKSHLQKYRLHNRKSPGTASASHSIVLVGDLWASQEVSCSQSGSPQGPLQLSGSGVAVSAATAGDSCCEDDDKSEGYVRK

SEQ ID NO: 2625 - DNA, 1411 bp, Triticum aestivum
  misc_feature: Ceres Clone ID no. 630408
  misc_feature: Encodes the peptide sequence at SEQ ID NO. 2626
agttcacatccacctcatactttctcttgcaacaagtcagtaaagattccgtttggagagcgagagcgagagctccggtgtaaaatcgatgggtctggacgtaggagagatcggcatgggcgcagatttgagcctggatttgaagatgttcgcggccaagagcctggggcgggtcagggaagcgccggcggccgccatggacgactgtatccggaggctggaggaggagaagagcaagatcgaggtgttccggcgcgagctccccctctgcgcgcgcctcctcgccgacgtgattgatgtgatgaagaaggaggtggaggagaagaagagaggcggcgatcgaggagaggacagggaggacgccggcgcaggcgacaagagcaactggatgagcaccgcgcagctctggaccggcgattccgtccggggggacgatgcttccgagaagcaggatgagaggaggaggtcgtcggagccggaatctcgcgacggcgctggcttgccgtccaaggccgtgggctccggcgcgccggcgttcgcgccgccgagtttgaggaaggatgacaaggctgtgcggatgccggatctgccgtttctgtcgccggcaccgatcaagacctctccggctgctgctaccggcggcgctgaagaaagccgccgccagcttgttggattcgcgcaagaagcggcgagggctgcagccgccctggcaccggctgccccttccctaagcctccaggcgcagtcgcagcagacagcacagcagcagcagcagcaagcgaggaaggcgcggcggtgctggtcgccggagctgcacctccagttcgtcactgccctgcaccaactcggtggtccccaagttgctactccaaagcaaatcagggagctgatgaaggtggatggcctgaccaatgatgaagtgaagagccatctccagaaataccgtctgcacaaccgaagggcgccaggatctccggcagccaaccggccgatcgtgctcatgggagggctctggataactcaggagcagagcagctcccagtcagggggatcacctccggggcccctaaacttctcaagctcaggcgtagctgcctcatcggtgacggtcagcggcgaggaggaagatggcagatccgagagctatggctggaaatgatcaacaagttatattagtgtttgttcagagatttccatggcgcgcgatgacagtggtatcttgagagattcctgagacaggattatagtgtagtcttttttgttgtatgcagggtgatcaagccttgagtgctttgagatgaaactcttgctgttattatgtaagtacatcgggaagaggttataccagttacaattttgcggatatgttaatctaaaaaggttggggcagagctacaattttcgcccagag

SEQ ID NO: 2626 - protein, 356 aa, Triticum aestivum
  misc_feature (235)..(286): Pfam Name: Myb_DNA-binding Pfam Description: Myb-like DNA-binding domain
  misc_feature: Ceres Clone ID no. 630408
  misc_feature: Bit score of 769.1 for HMM based on sequences of Figure 34
  misc_feature: Functional Homolog Of SEQ ID NO. 2619
  misc_feature: in Figure 34
MGLDVGEIGMGADLSLDLKMFAAKSLGRVREAPAAAMDDCIRRLEEEKSKIEVFRRELPLCARLLADVIDVMKKEVEEKKRGGDRGEDREDAGAGDKSNWMSTAQLWTGDSVRGDDASEKQDERRRSSEPESRDGAGLPSKAVGSGAPAFAPPSLRKDDKAVRMPDLPFLSPAPIKTSPAAATGGAEESRRQLVGFAQEAARAAAALAPAAPSLSLQAQSQQTAQQQQQQARKARRCWSPELHLQFVTALHQLGGPQVATPKQIRELMKVDGLTNDEVKSHLQKYRLHNRRAPGSPAANRPIVLMGGLWITQEQSSSQSGGSPPGPLNFSSSGVAASSVTVSGEEEDGRSESYGWK

SEQ ID NO: 2627 - protein, 375 aa, Musa acuminata
  misc_feature (247)..(298): Pfam Name: Myb_DNA-binding Pfam Description: Myb-like DNA-binding domain
  misc_feature: Public GI ID no. 102139855
  misc_feature: Bit score of 867.0 for HMM based on sequences of Figure 34
  misc_feature: Functional Homolog Of SEQ ID NO. 2619
  misc_feature: in Figure 34
MAGIGLELRLCASRTVGGFVKQVAAVVESTDRGVAKLEESVRSLEEERRKIDAFKRELPLCMLLLTDVIEGLKKELERCRGQKLANAFEEFIPIRRKCEEEAGVKLEADYEDKKNWMSSAQLWSVNSSENNDEDDKSITDERNGRPDCDAEKESLNLESKNLSAGGAFVQFKGISALAMKPKEEVKPLPDLSLRSPAVKSNSCPVSAVTEHQAGGVSGSKGVGRAPPAMTGAHLSLQVMQQTPRKARRCWSPELHRRFVLALYQLGGVRVATPKQIRELMKVDGLTNDEVKSHLQKYRLHSRKLPNASASFSRPPMVLGGLWVPPENHTVSPQQSDSQSGSPQSSLRLAGCDGTISAAAGASCEEEGKSESCNGR

SEQ ID NO: 2628 - protein, 382 aa, Vitis vinifera
  misc_feature (247)..(298): Pfam Name: Myb_DNA-binding Pfam Description: Myb-like DNA-binding domain
  misc_feature: Public GI ID no. 147860059
  misc_feature: Bit score of 901.9 for HMM based on sequences of Figure 34
  misc_feature: Functional Homolog Of SEQ ID NO. 2619
  misc_feature: in Figure 34
  misc_feature (119)..(119): Xaa is any aa, unknown, or other
MAELRLDLNPGCELKTVSSFLREVSMMRDSSEKLSKLDDYVKGLEDEMRKIDGFKRELPLCMLLLNDAILRLREEAMQCTESEGGHVTEEFIPLKGRSEGDEGAEMGKDSSDKRSWMSXAQLWSCNRSSDNNNKKSVLEFQQRNEEDNNSGSENPIRPCSYGNRAGAFVPFKVSSGFPAKGDKEVVPVAGLSLMTPMVEVDPNNSNSKCGNSGETGSGSVSTLLTDSMRLQCKSQQQPPQQGIRKQRRCWSPELHRRFVNALQQLGGSQAATPKQIRELMQVEGLTNDEVKSHLQKYRLHVRRIPSTSAAPANGSWVPQVQVGDVSKKNISQSGSPQGPLHLAGSAKGVSGTGGDSMEYDEDDKSEGHSWKDQLHKPGEDDV

SEQ ID NO: 2629 - protein, 406 aa, Populus balsamifera subsp. trichocarpa
  misc_feature (263)..(314): Pfam Name: Myb_DNA-binding Pfam Description: Myb-like DNA-binding domain
  misc_feature: Public GI ID no. 118486821
  misc_feature: Bit score of 954.0 for HMM based on sequences of Figure 34
  misc_feature: Functional Homolog Of SEQ ID NO. 2619
  misc_feature: in Figure 34
MGSLSSELSLDFARPSTAKALPFLPKTIADFLKEVSVIGDSAVKVLKVDGFIKDLEEEKRKIDAFKRELPLCMLLLNDAIQVLREELMQLGASKNQQPVLEEFIPLKKNIDDHHENDGLIEEKDSKDKKNWMSSVQLWNADDHHPSTDYLFDPKQNLKLESKTNKKGNQYGNEDAFQAGIGRTAARTFMPFKACSGLSSKEEKLPVPSLSLSTPGIKSLKEESNSTGSRSSCSRSVSTISGPNSDSNLRNGPQSQQQTARKQRRCWSPELHRRFVNALQQLGGSQAATPKQIRELMQVDGLTNDEVKSHLQKYRLHTRRVTPATAAAPANQSVVVLGGLWMTQDQYGDSSKATSSQSGSPQGPLQLAVNTGGTSTTGGDSMEDDEDAKSEGYSWKSHSHRSGKDDV

SEQ ID NO: 2630 - DNA, 1365 bp, Glycine max
  misc_feature: Ceres Clone ID no. 1104471
  misc_feature: Encodes the peptide sequence at SEQ ID NO. 2631
atctgggcatgatagtttgcgacttctgggaccatagtctcgctctgagttagagaaaaacaccaaaaccacaaatactaccatcatggagctgagtttggatttgagtttaggctttgttcccaaacctctttccctgtttttcgccgacgtttctgcgaacagagacaaagtggccacactcgatggcttcgtgcagagattggaggaagaattgaaaaaggtcgaggctttcaaacgtgagcttcctctctgcattcttctcctaaacgatgctatagctagattgaaggaggaaaaagtgaagtgttcgggaatgcaagatccgccactgaaaaccagttctggaggaaacaaaaatgaaagctctgagaagatgaattggatgagttcagcgcagctttggagcactcagaaaaccaaatcgagaaatgaggaagatgataggtctgtgccagcgaacccaattaatgggaattcgtgtgtcctcgagaaggagggttcccaagttccgagctttggtttgatggctcgtgcttctgaactgagtcatagcaattccaagagtgttggtggagatattagttctggctcctctttgctccgtgttgaggtacagagtcagccacaaccgccgcaacatatgcaacagaatccgaggaaacaacgccgctgctggtcgccggagcttcaccgccgctttgtggacgctcttcaacaacttggtggagcacaagtggccactcctaaacagattagagaactgatgcaggtggaaggccttacaaatgatgaagtgaaaagccatttgcaaaagtacaggcttcacgttaggagatttccagtttcttcaactggccaggctgataatgggtcatggatgtcacaagatgaatctggggataaatcaaagggaaacaacatgtcacagtctggttctccacaaggtcctctcacacctctgatcctaggaggaggaggaggaggatctgctaagggtctctcaagccctggacagaacagtgtggatggagaagatgagcaatctgattgccggaattggaaaggagggctccaccaccaccagcttgaagctgataatcaatgcctctaatattttgcagataaattataatacaatacataaatgatgaagagttgaagacccagaatttgacaacataagaataatagatctaacacatagaagaactatagggatcaagttttatgctaccattattttaaactgtttggtagagagcaactgaggttttacaaatttttcgggtttcttcttttttaaactcggtatagttgtatggagcttaacttttactgggcaattttcatagattaatcccc

SEQ ID NO: 2631 - protein, 342 aa, Glycine max
  misc_feature (195)..(246): Pfam Name: Myb_DNA-binding Pfam Description: Myb-like DNA-binding domain
  misc_feature: Ceres Clone ID no. 1104471
  misc_feature: Bit score of 754.8 for HMM based on sequences of Figure 34
  misc_feature: Functional Homolog Of SEQ ID NO. 2619
  misc_feature: in Figure 34
MELSLDLSLGFVPKPLSLFFADVSANRDKVATLDGFVQRLEEELKKVEAFKRELPLCILLLNDAIARLKEEKVKCSGMQDPPLKTSSGGNKNESSEKMNWMSSAQLWSTQKTKSRNEEDDRSVPANPINGNSCVLEKEGSQVPSFGLMARASELSHSNSKSVGGDISSGSSLLRVEVQSQPQPPQHMQQNPRKQRRCWSPELHRRFVDALQQLGGAQVATPKQIRELMQVEGLTNDEVKSHLQKYRLHVRRFPVSSTGQADNGSWMSQDESGDKSKGNNMSQSGSPQGPLTPLILGGGGGGSAKGLSSPGQNSVDGEDEQSDCRNWKGGLHHHQLEADNQCL

SEQ ID NO: 2632 - protein, 274 aa, Oryza sativa subsp. japonica
  misc_feature (152)..(203): Pfam Name: Myb_DNA-binding Pfam Description: Myb-like DNA-binding domain
  misc_feature: Public GI ID no. 125588020
  misc_feature: Bit score of 472.9 for HMM based on sequences of Figure 34
  misc_feature: Functional Homolog Of SEQ ID NO. 2619
MKEEAGKRRKDGDDAEAKAEDGDKTKWMSTAQLWVDSRGSDADSENDRRSGSTSPASRLLGGAEESSSRAVAPPPYFRREERVVLRPAMPLLPPASHRSPPPAAAAAATAAGDDHRHVVASSFATAVPSPVPAALSLQAQAQQQQQQARKSRRCWSPELHRQFVAALQQLGGPQVATPKQIREVMKVDGLTNDEVKSHLQKYRLHNRKSPGTASASHSIVLVGDLWASQEVSCSQSGSPQGPLQLSGSGVAVSAATAGDSCCEDDDKSEGYVRK

SEQ ID NO: 2633 - DNA, 1609 bp, Glycine max
  misc_feature: Ceres Clone ID no. 537690
  misc_feature: Encodes the peptide sequence at SEQ ID NO. 2634
tttcgttctgaaatttccttcacatccawcccactttccttttctctctccctctcttattatttattttttcattcattcatttcgctctctctctcccccttctcctttcttcctctgcaaccaaaatctgaatcttagggcaccaacacctttgatccaatgggttcggttgccgcagaagaactgaacttagatttaagatcctccttcgtccccaaaaccatcaccgatttcctccgccacctctccgccaacaacaaccaccctgccaccctccgcgatttcctctcccgcctcgaagacgagctccgcaagatccacgccttcaaacgcgaactccccctctccatgctcctcttaaacgacgcaatttccgttctgaaggttgaatcgcagaaatgctgcagggtggcgcgcgattcgccgccggtgctggaggagttcattccgttgaagaaggagcttggtgatcagagcgaggaggaggaggagaatgatgatgacaaggacgataacgaatgcagggataagaggaattggatgagttccgttcagctctggaataacaacactaccaccactactactaataacaacaacaatgcctctgatcgcaaacaactacttcataaattacaaaccaagaaaagtgaagaagggcagtctgtggctgaggatccttttcagacttgtagtaatagaaatgggggaagaagggcatttatgcctttctctaggtactcttcttcatcatcatctgtgccggtgacaacagtggggctgggggctgcatccaaagaagagaaggaagagagtgttaggaataggctttctcttctgacgccttctgtgaaagaagggtgtggttcaaggggatcaaggagcagttctaacagggctgtttcttcttctcctcccacggctcagccgggtttgcgtgcgacttcgcttcagcagactgctaggaaacagaggaggtgctggtcccctgagttgcacagacgattcgttaatgccttgcagaagcttggaggttctcaagcagctacaccaaagcaaattagagagcttatgcaggttgatggcctaactaacgatgaagtgaagagccatttacaaaaataccgacttcatacgcggagagttcctgctgcaagttctaatcagccagttgtggttcttggaggtttgtggatgtctcaagatcagtacaatgactcttcaaaagttagcagttcagggtcaggttctcctcaaagtcctcttcatttggctgcagggtcccggggagggacatctcctactgaaggtgacagcatagaagatgatgaagatgcaagatccgagagttatagttggaaaagtcatatgaacaaaccaggaaaagttgatgtataggatactactctccaccatgaattttgcagataaaagtatacatgggaggagttttaccactacataagaataatactacatgatacataaaaaagagggtcaacgataagaggcagttgtagtttttttttaaggtttagctttgccttatatactgcgtgagttttgatatgagactccgaattaaaatatcattttccttcgcttt

SEQ ID NO: 2634 - protein, 412 aa, Glycine max
  misc_feature (272)..(323): Pfam Name: Myb_DNA-binding Pfam Description: Myb-like DNA-binding domain
  misc_feature: Ceres Clone ID no. 537690
  misc_feature: Bit score of 545.1 for HMM based on sequences of Figure 34
  misc_feature: Functional Homolog Of SEQ ID NO. 2619
MGSVAAEELNLDLRSSFVPKTITDFLRHLSANNNHPATLRDFLSRLEDELRKIHAFKRELPLSMLLLNDAISVLKVESQKCCRVARDSPPVLEEFIPLKKELGDQSEEEEENDDDKDDNECRDKRNWMSSVQLWNNNTTTTTTNNNNNASDRKQLLHKLQTKKSEEGQSVAEDPFQTCSNRNGGRRAFMPFSRYSSSSSSVPVTTVGLGAASKEEKEESVRNRLSLLTPSVKEGCGSRGSRSSSNRAVSSSPPTAQPGLRATSLQQTARKQRRCWSPELHRRFVNALQKLGGSQAATPKQIRELMQVDGLTNDEVKSHLQKYRLHTRRVPAASSNQPVVVLGGLWMSQDQYNDSSKVSSSGSGSPQSPLHLAAGSRGGTSPTEGDSIEDDEDARSESYSWKSHMNKPGKVDV

SEQ ID NO: 2635 - DNA, 1529 bp, Panicum virgatum
  misc_feature: Ceres Clone ID no. 1828957
  misc_feature: Encodes the peptide sequence at SEQ ID NO. 2636
gttcccatccgcctcgcagctccctcccccttccaacacgcaggacagcgtagtttcaattcaatccatccattccgatggggctcgacgtcttggagatcgggatgggctccgatttgagcctggatctgaggcacttcgcctccaaggccgtccggcaggccagggatgcgccggcgtcggacgtcgacgcctgcatccgccgcctcgaggaggagcggggcaagatcgagatgttcaggcgtgagctcccgctctgcgcgcgcctcctcgccgaagtgatcgatgtcatgaaggcggaggcggggacgaagacgaagagcgatcgcaaggcggcggaggaggacggcgccgccggggacaagagcaagtggatgagcacggcgcagctctggaccggcgattccggccgggaggatgcggcatcagagaagcaagacaaggggaggagctcgccggaggccaggtcccccagcggcggcggcggcggcgctttcttgccgttcaaggctgtgggctccggcgcgccggcgttcgcgccgctgtgcttgagagcggatgacaaggccgcggacgcggggacgccggatctgtccttgctgtctccgccggcgatcaagagcgctccggctgctgctgccggcgccgcccaggaaagccgtcgccaggtcgtggggttcgcgcaggcagcggcgagggcggtcgccatggcgccggctggcccttctcttagcctccagtctcaaccgcagcagacatctcagcagcagcagcagcagcagcaggcggcgaggaaggccaggcgcacttggtcgccggagcttcaccgccagttcgtcgcagccttgaatcaactcggtggcgcccaagttgccactcccaagcaaatcagggagctgatgaaggtggatggcctgacgaacgatgaggtgaaaagccatcttcagaagtaccggctgcacaaccgaagagcgcctggatccgccgttgtaaaccagccaattgtgcttgtgggagggctctggatcccccaggagcaaagcagctcacagtctggatctccccagggccctctccacttctcaacatcaggcatcgccgtctcatcggcggccaccgtcagctgtgaggaggaagatggccggtccgagagctatggctggaaatgatgaagaggctgctgcatcatcagtgttcagagagacagactttggtggattgcgatgctgccagttacagcttcaggtgggagccatgacatgaggagattttggtgtagtctatctgtatacaatacaggggagatcgggccttgagcgctcgagatggaactgatggtgcgtcggcgttgggttgtacatcagaaagagatgatactagttacagttttgcggcttgttaatccatgttccgggcaaagctacaattttcgccctgagagagtttatctacctatatctgttgtcgattataccattttctctttttttttttctgttgaataaatattgttttgctgttgttcatgg

SEQ ID NO: 2636 - protein, 363 aa, Panicum virgatum
  misc_feature (242)..(293): Pfam Name: Myb_DNA-binding Pfam Description: Myb-like DNA-binding domain
  misc_feature: Ceres Clone ID no. 1828957
  misc_feature: Bit score of 620.2 for HMM based on sequences of Figure 34
  misc_feature: Functional Homolog Of SEQ ID NO. 2619
MGLDVLEIGMGSDLSLDLRHFASKAVRQARDAPASDVDACIRRLEEERGKIEMFRRELPLCARLLAEVIDVMKAEAGTKTKSDRKAAEEDGAAGDKSKWMSTAQLWTGDSGREDAASEKQDKGRSSPEARSPSGGGGGAFLPFKAVGSGAPAFAPLCLRADDKAADAGTPDLSLLSPPAIKSAPAAAAGAAQESRRQVVGFAQAAARAVAMAPAGPSLSLQSQPQQTSQQQQQQQQAARKARRTWSPELHRQFVAALNQLGGAQVATPKQIRELMKVDGLTNDEVKSHLQKYRLHNRRAPGSAVVNQPIVLVGGLWIPQEQSSSQSGSPQGPLHFSTSGIAVSSAATVSCEEEDGRSESYGWK

SEQ ID NO: 2637 - DNA, 1080 bp, Sorghum bicolor
  misc_feature: Ceres Annot ID no. 8644036
  misc_feature: Encodes the peptide sequence at SEQ ID NO. 2638
atggggctcgacgtcgtggagatcgggatgggcgccgatttgagcctggatctgaggcacttcgccaccaaggccgtgaggcagagcaaggacgacgcgcctgcgccggacatggacgcctgcatccgccgcctcgaggaggagcggggcaagatcgagatgttcaagcgggagctccccctctgcgcgcggctcctcgccgacgtgattgatgtcatgaaggaggaggccggtaagaagacgacgaagagaagtgatcgcagcctgccggcggcggaggaggacgaggacggcgccgctggggacaagagcaagtggatgagcacggcgcagctctggacgggcgattccggccgggaggacgcggaatcagagaagcaagacaaggggaggagtttgccggaggccaagtcccgcggcggcgctctcttgccgttcaaggctgctgtgggctccggcgcgccggcgttcgcgtcgctctgcttgagaacggacgacaaggctgcgcgcgtcgggatgccggatctgtccttgctgtcgccgccggcgaccaagagcgccgccgaggagagccggcgccaggtggtggggcttgcgcaggcagcagcgagggcggccgccatggcgccagctgcccctgcgcttggcctccagtcccaatcgcagcagcagacagctcagcagcagcagcagcaggcaaggaaggttcggcgttgctggtcgacggagctgcatcgccagttcgtcgccgccttgaatcaactcggtggcccccaagttgccaccccgaagcaaatcagggagctgatgaaggtggatggcctaacaaacgacgaagtcaagagccatcttcagaaataccggctgcacaaccgaagggcgcctggatcaggcgtggtgagccagccgattatgctcgtgggagggctctggattccccaggagcaaagcagctctcagtctgggtctccccatgggcccctccacttctccaccgcctcaggcatcgccgtctcgtcggcggccaccgtcagctgcgaggaggaagatggccggtcagaaagctatggctggaaatga

SEQ ID NO: 2638 - protein, 359 aa, Sorghum bicolor
  misc_feature (237)..(288): Pfam Name: Myb_DNA-binding Pfam Description: Myb-like DNA-binding domain
  misc_feature: Ceres Annot ID no. 8644036
  misc_feature: Bit score of 598.9 for HMM based on sequences of Figure 34
  misc_feature: Functional Homolog Of SEQ ID NO. 2619
MGLDVVEIGMGADLSLDLRHFATKAVRQSKDDAPAPDMDACIRRLEEERGKIEMFKRELPLCARLLADVIDVMKEEAGKKTTKRSDRSLPAAEEDEDGAAGDKSKWMSTAQLWTGDSGREDAESEKQDKGRSLPEAKSRGGALLPFKAAVGSGAPAFASLCLRTDDKAARVGMPDLSLLSPPATKSAAEESRRQVVGLAQAAARAAAMAPAAPALGLQSQSQQQTAQQQQQQARKVRRCWSTELHRQFVAALNQLGGPQVATPKQIRELMKVDGLTNDEVKSHLQKYRLHNRRAPGSGVVSQPIMLVGGLWIPQEQSSSQSGSPHGPLHFSTASGIAVSSAATVSCEEEDGRSESYGWK

SEQ ID NO: 2639 - DNA, 1342 bp, Zea mays
  misc_feature: Ceres Clone ID no. 285434
  misc_feature: Encodes the peptide sequence at SEQ ID NO. 2640
agttcccatccgccgcccgcgcacttgttccttccggcacagcacacaggacaccgtagacagattcatcgcgacgatggggctggacgtcgtggagatcgggatgggcgccgatttgagcctggatctgaggcacttcgcctccaaggccgtgcggcagagcaaggactacgcgccggcgccggcgccggacatggacgcctgcatccgccgcctcgaggaggagcggggcaagatcgagatgttcaagcgggagctgccgctctgcgcgcgcctcctcgcagacgtgatcgatgtgatgaaggaggaagcggggaaggcggtggcggaggaggacggcgccgccggggacaagagcaagtggatgagcacggcgcagctctggacgggcgattgcggccgcgaggacgcggaaccagagaagcaagacaaggagaggagctcgcctgaggccaggtctcgcgccgccggcggcgctttcttgccgctcaaggctgccgtgggctccggcgcgccggcgttcgcgccgctcggcttgagaatggacgacaaggccgccgcgcgcgccgggatgcccgacctgtgcttgctgtcgccgccggcgaccaagagcgccgccgaggagagccgacgccaggtggtggggtttgcgcaggcggcgacgagggcggccgccgccacggcgccagctgccccttcgcttagcgttggcgtccagtccccgtcgcagcaggcgaggaaggctcggcgttgctggtccacggagctgcatcgccagttcgtcgccgccttgaaccagctcggtggcccccaagttgccaccccaaagcagatcagggagctgatgaaggtggacggcctcacaaacgacgaagtgaaaagccaccttcagaaataccggctgcacaaccggagggcgccagggtccggcgtggtgagccagcccatcgtgctggtgggagggctgtggattccgcaggagcaaagcagctcgcagtccgggtctccccacggcccgctccacttctccacctcaggcatcgcagtctcgtcggcggccaccgtcagctgcgaggaggaagacggacggtccgagagctatggctggaaatgatgcagaggctgctgctgctgctgctgctgagaggggagctgcagcctcaggaacgggaatcatcaggagggaaactgagagtagtgtagctgtctgtacacatacatagttacattacattacatacagggagtgagggagatcgggccttgagcgctcgagaccaaactgatgcttcgggtttgtacatcccaaagagatgagatgatacagttttgcggctaatcc

SEQ ID NO: 2640 - protein, 345 aa, Zea mays
  misc_feature (224)..(275): Pfam Name: Myb_DNA-binding Pfam Description: Myb-like DNA-binding domain
  misc_feature: Ceres Clone ID no. 285434
  misc_feature: Bit score of 570.9 for HMM based on sequences of Figure 34
  misc_feature: Functional Homolog Of SEQ ID NO. 2619
MGLDVVEIGMGADLSLDLRHFASKAVRQSKDYAPAPAPDMDACIRRLEEERGKIEMFKRELPLCARLLADVIDVMKEEAGKAVAEEDGAAGDKSKWMSTAQLWTGDCGREDAEPEKQDKERSSPEARSRAAGGAFLPLKAAVGSGAPAFAPLGLRMDDKAAARAGMPDLCLLSPPATKSAAEESRRQVVGFAQAATRAAAATAPAAPSLSVGVQSPSQQARKARRCWSTELHRQFVAALNQLGGPQVATPKQIRELMKVDGLTNDEVKSHLQKYRLHNRRAPGSGVVSQPIVLVGGLWIPQEQSSSQSGSPHGPLHFSTSGIAVSSAATVSCEEEDGRSESYGWK

SEQ ID NO: 2641 - protein, 355 aa, Oryza sativa subsp. japonica
  misc_feature (230)..(281): Pfam Name: Myb_DNA-binding Pfam Description: Myb-like DNA-binding domain
  misc_feature: Public GI ID no. 115470343
  misc_feature: Bit score of 565.8 for HMM based on sequences of Figure 34
  misc_feature: Functional Homolog Of SEQ ID NO. 2619
MGLDVGEIGVGAADLSLDLKMFAAKSFGRVRGKDTTTTAMGDCIRRLEEEMGKIEVFRRELPLCVRLLADVIDVMKEEVEKKGGDRKEDEEDAAGDKSNWMSTAQLWTGNSGGPDAAAADPEKQDKVRISSEAKSNGGAFVGSGAPAFARPKQSLMRKEDMAYDVRMPDLSLLSPPASAAAADESRRQVVGFSQAAARAAAMAASGPALSLQPQPQPAAAQQQQQARKTRRCWSPDLHRKFVAALQQLGGPQVATPKQIRELMKVDGLTNDEVKSHLQKYRLHNRPRVPSSTIVNQPIVLMQGLCYIPQEQSSSQSGSPEGPLHFSGSGMAGGGSSAATVSCEEEDGRSESYGWK

SEQ ID NO: 2642 - protein, 355 aa, Oryza sativa subsp. indica
  misc_feature (230)..(281): Pfam Name: Myb_DNA-binding Pfam Description: Myb-like DNA-binding domain
  misc_feature: Public GI ID no. 125557053
  misc_feature: Bit score of 565.2 for HMM based on sequences of Figure 34
  misc_feature: Functional Homolog Of SEQ ID NO. 2619
MGLDVGEIGVGAADLSLDLKMFAAKSFGRVRGKDTTTTAMGDCIRRLEEEMGKIEVFRRELPLCVRLLADVIDVMKEEVEKKGGDRKEDEEDAAGDKSNWMSTAQLWTGNSGGPDAAAADPEKQVKVRISSEAKSNGGAFVGSGAPAFARPKQSLMRKEDMAYDVRMPDLSLLSPPASAAAADESRRQVVGFSQAAARAAAMAASGPALSLQPQPQPAAAQQQQQARKTRRCWSPDLHRKFVAALQQLGGPQVATPKQIRELMKVDGLTNDEVKSHLQKYRLHNRPRVPSSTIVNQPIVLMQGLCYIPQEQSSSQSGSPEGPLHFSGSGMAGGGSSAATVSCEEEDGRSESYGWK

SEQ ID NO: 2643 - DNA, 1479 bp, Zea mays
  misc_feature: Ceres Clone ID no. 225486
  misc_feature: Encodes the peptide sequence at SEQ ID NO. 2644
atccgccgcccgcgcacttcttccttcgggcacacaggacaccaccgtcgacggattcatcgcgacgatggggctcgacgtcatggagatcgggatgggcgccgatttgagcctggatctgaggcacttcgcctccaaggccgtgaggcagagcaaggacgacacgccggcgccggacatggacgcatgcatccgccgcctcgaggaggagcggggtaagatcgagatgttcaagcgggacctcccgctctgcgcgcgcctcctcgccgacgtaattgatgtcatgaaggaggaggcggggaagaagaagacgacgacaaggaggagtgaccgcaggctggcgtctgcggcagctgatgaggaggaggaggaggaggacggcgccaccgcggacaagagcaagtggatgagcacggcgcagctctggacgggcgattccgggcgggaggacggggaatcagagaagcaagacaaggggcggtgctcgccggaggccaggtcccgcggcgctctcttaccgttcaaggctgatgtgggttctggcgcgccggcgttggcgccgctctgcttgagaacggacgacaaggctgcggctgcgcgcgtcggggtgccggatctgtcgtccttgctgtcgccgccggcgaccatgcctcctgcggacgccggcgccgaggagagccgtcgccaggttgtgggatttgcgcaagctgcggccagggcggctgccatggccccgtgtgcccctgcgcttgggctccagtcccagtcgcagcagcagcagcagcagcagcagcaggcaaggaaggctcggcgttgctggtcgacggagctgcatcgcaagttcgtcgccgccttggatcagctcggtggcccccaagttgccacgccgaagcaaatcagggagctgatgaaggtggatgggctgacaaacgacgaagtgaaaagccatcttcagaaataccggctgcacaaccggagggcgcctggatccggcgtggtgcgccagccgatcgtgctcgtgggagggctgtggattccccaggagcaaggcagccctcagtctggatctccccacggccccctccaccacctgtccacctcggtggccgccgtctcgtccgccgccaccgccagctgcgaggaggaagacggccggtccgagagctatggctggcaatgatgtctggctgctgctgctgctgcaccaccaatgtgtgttcactgttcagagaggggaggtttcttggcatggtggggatcgccatgggccatggcggaggccaccagttgcagcttcaggaatcgggaggggaattgagtgtagtgtagctgtctgtacacatacatacatacatacagtgagatgggatgagatgagagcgggccttgagcgctcgagatcagaactgatggtgcttcgtcgtcgggtttgtacatcccaaagagaaagagatactagctacagttttgcggcttgct

SEQ ID NO: 2644 - protein, 370 aa, Zea mays
  misc_feature (248)..(299): Pfam Name: Myb_DNA-binding Pfam Description: Myb-like DNA-binding domain
  misc_feature: Ceres Clone ID no. 225486
  misc_feature: Bit score of 553.4 for HMM based on sequences of Figure 34
  misc_feature: Functional Homolog Of SEQ ID NO. 2619
MGLDVMEIGMGADLSLDLRHFASKAVRQSKDDTPAPDMDACIRRLEEERGKIEMFKRDLPLCARLLADVIDVMKEEAGKKKTTTRRSDRRLASAAADEEEEEEDGATADKSKWMSTAQLWTGDSGREDGESEKQDKGRCSPEARSRGALLPFKADVGSGAPALAPLCLRTDDKAAAARVGVPDLSSLLSPPATMPPADAGAEESRRQVVGFAQAAARAAAMAPCAPALGLQSQSQQQQQQQQQARKARRCWSTELHRKFVAALDQLGGPQVATPKQIRELMKVDGLTNDEVKSHLQKYRLHNRRAPGSGVVRQPIVLVGGLWIPQEQGSPQSGSPHGPLHHLSTSVAAVSSAATASCEEEDGRSESYGWQ

SEQ ID NO: 2645 - DNA, 1194 bp, Oryza sativa
  misc_feature: Ceres Annot ID no. 1733246
  misc_feature: Encodes the peptide sequence at SEQ ID NO. 2646
atggggctggatgtgggggaaatcggcgtcggcgcggcggacctgagcctggatctcaagatgttcgccgccaagagcttcggccgcgtcaggggcaaggacaccaccaccaccgccatgggtgactgcatccggaggctcgaggaggagatgggcaagatcgaggtcttccgccgcgagctccccctctgcgtccgcctcctcgccgacgtgattgatgtgatgaaggaggaggtggagaagaagggtggtgatcgtaaggaggatgaggaggacgccgccggcgacaagagcaactggatgagcaccgcgcagctctggactgggaattccggcggcccagacgccgccgccgctgatccagaggacaaggtgaggatctcgtcggaggcgaagtccaacggcggcgcgtttgtgggctctggcgcgccggctttcgcgcggccgaagcagagcttgatgaggaaggaggacatggcgtacgacgtcaggatgccggatctgtcgctgctctcgccgcctgcttccgccgccgccgccgacgaaagccgccgtcaggtcgtgggcttctcccaggccgcggcgagggctgccgccatggcggcgtctggccccgctctcagcctccagccccagcctcagccggcggcggcgcagcagcagcagcaggcgaggaagacgaggcggtgctggtcgccggacctccaccgcaagttcgtcgccgccttgcagcaactcggtggccctcaagttgccactccaaagcaaatcagggagctgatgaaggtggatggactgacaaatgacgaggtcaaaagccatcttcaggtgaggaaaattcaccactgttttttttgtttaccacaagattttcttcatcaatgttcagtaacaatcatgacttctcgcgacggatttgcgatgatactgatgtcgatttttgcgattctgattgcgcagaagtaccgcctgcacaaccggccgagagtgccaagctcaacaattgtgaaccaaccgattgtgctcatgcaagggctctgttacattcctcaagagcaaagcagctcccagtctggatcccctgagggtcctctccatttctcaggctcaggcatggccggtggcggctcatcggcggcgacggtcagctgcgaggaggaggatggcaggtctgagagctatggctggaaatga

SEQ ID NO: 2646 - protein, 397 aa, Oryza sativa
  misc_feature (228)..(279): Pfam Name: Myb_DNA-binding Pfam Description: Myb-like DNA-binding domain
  misc_feature: Ceres Annot ID no. 1733246
  misc_feature: Bit score of 504.3 for HMM based on sequences of Figure 34
  misc_feature: Functional Homolog Of SEQ ID NO. 2619
MGLDVGEIGVGAADLSLDLKMFAAKSFGRVRGKDTTTTAMGDCIRRLEEEMGKIEVFRRELPLCVRLLADVIDVMKEEVEKKGGDRKEDEEDAAGDKSNWMSTAQLWTGNSGGPDAAAADPEDKVRISSEAKSNGGAFVGSGAPAFARPKQSLMRKEDMAYDVRMPDLSLLSPPASAAAADESRRQVVGFSQAAARAAAMAASGPALSLQPQPQPAAAQQQQQARKTRRCWSPDLHRKFVAALQQLGGPQVATPKQIRELMKVDGLTNDEVKSHLQVRKIHHCFFCLPQDFLHQCSVTIMTSRDGFAMILMSIFAILIAQKYRLHNRPRVPSSTIVNQPIVLMQGLCYIPQEQSSSQSGSPEGPLHFSGSGMAGGGSSAATVSCEEEDGRSESYGWK

SEQ ID NO: 2647 - protein, 401 aa, Vitis vinifera
  misc_feature (258)..(309): Pfam Name: Myb_DNA-binding Pfam Description: Myb-like DNA-binding domain
  misc_feature: Public GI ID no. 147858322
  misc_feature: Bit score of 721.9 for HMM based on sequences of Figure 34
  misc_feature: Functional Homolog Of SEQ ID NO. 2619
MGSIPPELSLDLRPSYVPKTINDFLSGISTIGDVSERVTKLDEFLKRLEEEMRKIDAFKRELPLCMILLSDAILALKEELLRSKASNVQPVLEEFIPLKKDCDEEGGAKEEKDCKDKKNWMSSVQLWNSDDSASTDHIYDKKQDSKLEIKQRVDEENRPATEDPFQPCKSRTGGRAFLPFKGYSGFPVATARKEDKDELPVHGLSLLTPGIKNPREESGSSGSKTSCSRGVSSSAPNLQPNLRTGPQPPQQQTARKQRRCWSPELHRRFVNALQQLGGSQAATPKQIRELMQVDGLTNDEVKSHLQKYRLHTRRMPTTSAAPPSNQPVVVLGSLWMPQDQYGDSSKASSSQSASPQGPLQLGGAAGGTSTTGGDSMEDDEDEKSESYGWKSQVHKSVKEDV

SEQ ID NO: 2648 - protein, 395 aa, Oryza sativa subsp. japonica
  misc_feature (249)..(300): Pfam Name: Myb_DNA-binding Pfam Description: Myb-like DNA-binding domain
  misc_feature: Public GI ID no. 115489338
  misc_feature: Bit score of 357.2 for HMM based on sequences of Figure 34
  misc_feature: Functional Homolog Of SEQ ID NO. 2619
MGSSSASAAQHEEAAAAAAFVLGGVDMRMLAARTATGALARAGGGEAAAAAAAAARFEDCIRSLEAEKAKMEVFRRELPISVHLIADVIEWLKDEVEKQRLLRRRQVEAPAAAPPPEMFAPPATAKRKSAASAAAEGVKAEADANDKRSWMSSAQLWSCGSHTSTSTSNGGSVKKQQHKVSNAFMPLATLPAFAKSLEKADAAVPDLSLSSRVAMADAPACPAAPSATSSAVTDVAVAQRQQAVQRKARRCWSPELHRRFVAALQRLGGPQAATPKQIRELMKVDGLTNDEVKSHLQKYRLHTRRASDGGDGGGDHQTVGGRLWPLPPEQYTTSQHSTSQSGSPQGPLQLTVSSSHAVSVTAGDSCDGGEEEEEDGKSGSYSWEMQNGARASSSS

SEQ ID NO: 2649 - protein, 395 aa, Oryza sativa subsp. indica
  misc_feature (248)..(299): Pfam Name: Myb_DNA-binding Pfam Description: Myb-like DNA-binding domain
  misc_feature: Public GI ID no. 125537206
  misc_feature: Bit score of 358.8 for HMM based on sequences of Figure 34
  misc_feature: Functional Homolog Of SEQ ID NO. 2619
MGSSSASAAQHEEAAAAAAFVLGGVDMRMLAARTATGALARAGGGEAAAAAAAARFEDCIRSLEAEKAKMEVFRRELPISVHLIADVIEWLKDEVEKQRLLRRRQVEAPAAAPPPEMFAPPATAKRKSAASAAAEGVKAEADANDKRSWMSSAQLWSCGSHTSTSTSNGGSVKKQQNKVSNAFMPLATLPAFAKSLEKADAAVPDLSLSSRVAMADAPACPAAPSATSSAVTDVAVAQRQQAVQRKARRCWSPELHRRFVAALQRLGGPQAATPKQIRELMKVDGLTNDEVKSHLQKYRLHTRRASDGGGGGGDHQTVGGRLWPPPPEQYTTSQHSTSQSGSPQGPLQLTVSSSHAVSVTAGDSCDGGEEEEEEDGKSGSYSWEMQNGARASSSS

SEQ ID NO: 2650 - protein, 370 aa, Vitis vinifera
  misc_feature (227)..(278): Pfam Name: Myb_DNA-binding Pfam Description: Myb-like DNA-binding domain
  misc_feature: Public GI ID no. 157340951
  misc_feature: Bit score of 587.6 for HMM based on sequences of Figure 34
  misc_feature: Functional Homolog Of SEQ ID NO. 2619
MGSIPPELSLDLRPSYMPKTINDFLSGISTIGDVSERVTKLDEFLKRLEEEMRKIDAFKRELPLCMILLSDAILALKEELLRSKASNVQPVLEEFIPLKKDCDEEGGAKEEKECKDKKNWMSSVQLWNSDDSASTDHIYDKKQDSKLEIKQVKIKIHFSHVKAGLGEEHSCHLRDTRVFRWPLLGRKIRMNCRSMDFLFSLQGLKIPGKNPVLVVQKLVQQTARKQRRCWSPELHRRFVNALQQLGGSQAATPKQIRELMQVDGLTNDEVKSHLQKYRLHTRRMPTTSAAPPSNQPVVVLGSLWMPQDQYGDSSKASSSQSASPQGPLQLGGAAGGTSTTGGDSMEDDEDEKSESYGWKSQVHKSVKEDV

SEQ ID NO: 2651 - DNA, 1368 bp, Glycine max
  misc_feature: Ceres Clone ID no. 560820
  misc_feature: Encodes the peptide sequence at SEQ ID NO. 2652
ctctttcgttatctggtcatggttgtttgcgacttctgggagctcagtctcgctcagagtcagagaaaaacacccaaatcaaatattatcatggagcccagcttggatttgagactgggctttgtccccaaacccctttccctgtttttcggcgacgtttctgggaacagagacaagtgcgacaaagtggtcacactcgatggcttcgtgcagagattggaggaagagttgacaaaggtcgaggctttcaaacgcgagcttcctctctgcattctcctcctaaacgatgctatagcgagattgaaggaggaaaaagtgaagtgttcgggaatgcaagatccgcctcttaaaaccagttcaggaggaaatgaaaatgaaaactctgagaagaagaattggatgagttcagcacagctttggagcactcagaaatccaaatcgaggaatgaggaagatgataggtctgtgccagcgaactcaattaatgggaattcgtgtgtccccgagaaggagggctcgcaagttccgagctttggtttgatggctcgtgcttctgaactgagtcatagcaattccaagagtgttggtggagatactagttctggctcctctttgctccgtgttgaggtacagagtcagccacagccgccgcagcatatgcagcagaatccgaggaaacaacggcggtgctggtcgccggagcttcaccggcgctttgtggacgcccttcaacaacttggtggagcacaagtggccactcctaaacagattagagaactgatgcaggtggaaggccttacaaatgatgaagtgaaaagtcatttgcaaaagtacaggcttcatgttaggagattcccagttttttcaattggccaggttgataatggctcatggatgacacaggatgaatgtggggataaatcaaagggaaacatgtcacagtctggttctccacagggtcctctcacacctctgctcctaggaggagcaggatccgctaagggtctctcaagccctggacggaacagtgtggatgcagaagatgagcaatcatcagattgccggaattggaaaggagggctccaccaccagcagcttgaaactgataatcacagcctctaaaattttgcagataaatgataatacaatacataaaatgatgaggagttgaaggcccagaatttgacaacataagaataatagagatctaacacataaaagaactatagggatcaagtttatgctaccagtattttaaactgtttggtagagagcaactgaggttttgcagatttttcaaggtttcttcttttctatttttaaactcagtatagttgtatggagcttaaattttactgggcaattttc

SEQ ID NO: 2652 - protein, 343 aa, Glycine max
  misc_feature (198)..(249): Pfam Name: Myb_DNA-binding Pfam Description: Myb-like DNA-binding domain
  misc_feature: Ceres Clone ID no. 560820
  misc_feature: Bit score of 667.1 for HMM based on sequences of Figure 34
  misc_feature: Functional Homolog Of SEQ ID NO. 2619
MEPSLDLRLGFVPKPLSLFFGDVSGNRDKCDKVVTLDGFVQRLEEELTKVEAFKRELPLCILLLNDAIARLKEEKVKCSGMQDPPLKTSSGGNENENSEKKNWMSSAQLWSTQKSKSRNEEDDRSVPANSINGNSCVPEKEGSQVPSFGLMARASELSHSNSKSVGGDTSSGSSLLRVEVQSQPQPPQHMQQNPRKQRRCWSPELHRRFVDALQQLGGAQVATPKQIRELMQVEGLTNDEVKSHLQKYRLHVRRFPVFSIGQVDNGSWMTQDECGDKSKGNMSQSGSPQGPLTPLLLGGAGSAKGLSSPGRNSVDAEDEQSSDCRNWKGGLHHQQLETDNHSL

SEQ ID NO: 2653 - DNA, 487 bp, Panicum virgatum
  misc_feature: Ceres Clone ID no. 1773290
  misc_feature: Encodes the peptide sequence at SEQ ID NO. 2654
cttctcccccacgctgaagacgacgccatccctcaccagctcgcctcctccactcctcccaaacccctcgccgactcagattccgctgccccgcgccgccgccgccgccatgccgttcaccccgggcccctactccggcgtcagcaccctcgctctcgtggcgagggcgtcggccttcggcgtcggcgtcgtctacgggagcatcaagctctccatcctcaaggcgacaaaacctaaaaaggaggaagcacatgcccatcactaaggatggcagggatgcaatgtgttacctgcagttcaaggatgtcataaattggcagtgtaccccttcttcatacgtgcatttgggtttatgatttgtggacctcttgtctgtaacacacctgctgagttaccttagctttgcgtcgtaataagttcttgatcccatgacttgaaatgaggtattaaaggcaaaagctgaaaagaaccctttagttcttgatcc

SEQ ID NO: 2654 - protein, 51 aa, Panicum virgatum
  misc_feature: Ceres Clone ID no. 1773290
  misc_feature: Bit score of 102.9 for HMM based on sequences of Figure 21
  misc_feature: Functional Homolog Of SEQ ID NO. 2654
  misc_feature: in Figure 21
MPFTPGPYSGVSTLALVARASAFGVGVVYGSIKLSILKATKPKKEEAHAHH

SEQ ID NO: 2655 - DNA, 156 bp, Sorghum bicolor
  misc_feature: Ceres Annot ID no. 8701724
  misc_feature: Encodes the peptide sequence at SEQ ID NO. 2656
atgcctttcactccgggcccctactccggcgtcagcaccctcgcccttgtggccagggcgtctgccttcagcgtcggtgtcgtctacgggagcatcaagctctcaatcctcaaggcaacaaaacctaaaaaggaggaagcacatgctcatcactaa

SEQ ID NO: 2656 - protein, 51 aa, Sorghum bicolor
  misc_feature: Ceres Annot ID no. 8701724
  misc_feature: Bit score of 103.5 for HMM based on sequences of Figure 21
  misc_feature: Functional Homolog Of SEQ ID NO. 2654
  misc_feature: in Figure 21
MPFTPGPYSGVSTLALVARASAFSVGVVYGSIKLSILKATKPKKEEAHAHH

SEQ ID NO: 2657 - DNA, 379 bp, Zea mays
  misc_feature: Ceres Clone ID no. 1531656
  misc_feature: Encodes the peptide sequence at SEQ ID NO. 2658
aaaaaaaactcctaaccctcgcccgactcagatctatctgccccgcgccgccgtcgccatgccgttcactccgggtccctactctggcgtcagcaccctcgcccttgtagcgagggcatcggtcttcggcttcggtgtcgtctacgggagcatcaagctctcaatcctcaaggcaacaaagcctaaaaaggaagaagcgcatgctcatcactaaggacgacagggctgctacatgttaatttctatggaaggatgatataaaaatgtggttgcactctttctccatacgtgcaatttgatttatgatttgtggacatcttgctgtaacacacctgctgagttatcttagttttgtgtcataataaattcttagccaatg

SEQ ID NO: 2658 - protein, 51 aa, Zea mays
  misc_feature: Ceres Clone ID no. 1531656
  misc_feature: Bit score of 101.1 for HMM based on sequences of Figure 21
  misc_feature: Functional Homolog Of SEQ ID NO. 2654
  misc_feature: in Figure 21
MPFTPGPYSGVSTLALVARASVFGFGVVYGSIKLSILKATKPKKEEAHAHH

SEQ ID NO: 2659 - protein, 52 aa, Oryza sativa subsp. japonica
  misc_feature: Public GI ID no. 115456900
  misc_feature: Bit score of 98.1 for HMM based on sequences of Figure 21
  misc_feature: Functional Homolog Of SEQ ID NO. 2654
  misc_feature: in Figure 21
MPFTPGPYSGVSTLALVARASALGVGVVYGAVKLSILKATKPNKKEAANAHH

SEQ ID NO: 2660 - DNA, 504 bp, Triticum aestivum
  misc_feature: Ceres Clone ID no. 869980
  misc_feature: Encodes the peptide sequence at SEQ ID NO. 2661
ctccctttatcaccccagccctcccctctggtcttcttctcacccacgaaacagagagagactccgccgtcgcagcgccagccaaaccctcgtcgtcgtctccgatcccgccgtcgcagccatgccgttcaccccgggaccctactccggcaagagcaccctcgccctcgtggccagggtctccgccgtcggcgtcggcctcgtctacggctccgtcaagctcggcatcctcaagatgaccaagcccaaggaggaagcagctgctgctcatcactgaggacaagtagctccagcgagttgacgccgtagmttcgcaatgtaccttctatacctgcattcggttctgtgatttgtgtctgaaacccaaaaaaacccagacccatgtgggagctgaacctttagcttttttgcttgtggaaaataatatcctcggctgaatcgacttgaaatcaggaagagtgaaacttaaaattctttggtgtggttctgcgatccagacaagtt

SEQ ID NO: 2661 - protein, 51 aa, Triticum aestivum
  misc_feature: Ceres Clone ID no. 869980
  misc_feature: Bit score of 95.0 for HMM based on sequences of Figure 21
  misc_feature: Functional Homolog Of SEQ ID NO. 2654
  misc_feature: in Figure 21
MPFTPGPYSGKSTLALVARVSAVGVGLVYGSVKLGILKMTKPKEEAAAAHH

SEQ ID NO: 2662 - DNA, 519 bp, Musa acuminata
  misc_feature: Ceres Clone ID no. 1739862
  misc_feature: Encodes the peptide sequence at SEQ ID NO. 2663
attttccctctaccgctccttccatggcgatacccggcccttactccggcgtcagcaccctcgcgttcgttgctcgtgcttcggcgttcgcgttcggtgtcgtttatggaagcgtcaagctatcgtatctccaggtcaaggcaaagtttcacaagaaggaagaggcaaaaggccaccactgaggaacagaatgcgggcgtgtgatggtgacaaattgacttcacctttgggttatatttaattgaaggattacaaggttggagaagtacggtaaacttcgactcttgagttacacttttacttttgattgcgatagcaacatcagatctcacgtccttactgtcttatcatcaaaaaagtttgaagtggaagctttaaaacatagttggtacgatacgaagttattttaaagcaattttaattattaaatgtagataactcagcttaagagggtgggtagttaacactgtcactggttctccttcagcttaaacgactctaatcgtcaacttatatcac

SEQ ID NO: 2663 - protein, 52 aa, Musa acuminata
  misc_feature: Ceres Clone ID no. 1739862
  misc_feature: Bit score of 103.3 for HMM based on sequences of Figure 21
  misc_feature: Functional Homolog Of SEQ ID NO. 2654
  misc_feature: in Figure 21
MAIPGPYSGVSTLAFVARASAFAFGVVYGSVKLSYLQVKAKFHKKEEAKGHH

SEQ ID NO: 2664 - DNA, 162 bp, Populus balsamifera subsp. trichocarpa
  misc_feature: Ceres Annot ID no. 1452831
  misc_feature: Encodes the peptide sequence at SEQ ID NO. 2665
atgacgctacctccaggtccttactccggtgccagcgctctcgctctggtggcgcgtgcatcagcattcagttttggcttggtttatggaagtgtgaagctcaagattctcaagatgaaagcaaattcacataagaaggcggaagctaaggcacatcactga

SEQ ID NO: 2665 - protein, 53 aa, Populus balsamifera subsp. trichocarpa
  misc_feature: Ceres Annot ID no. 1452831
  misc_feature: Bit score of 111.2 for HMM based on sequences of Figure 21
  misc_feature: Functional Homolog Of SEQ ID NO. 2654
  misc_feature: in Figure 21
MTLPPGPYSGASALALVARASAFSFGLVYGSVKLKILKMKANSHKKAEAKAHH

SEQ ID NO: 2666 - DNA, 361 bp, Brassica napus
  misc_feature: Ceres Clone ID no. 1123182
  misc_feature: Encodes the peptide sequence at SEQ ID NO. 2667
gatttgggatcatcttagggttttcttctcttctctccaatcaatggcgatacctccaggactatactccggcaccagctcccttgctctcgtggctcgtgcttcggcgtttagcgtgggtctcctctacgggagcatgaagctcaaggtcttgaagatgacaaagaagccacacaaggttgaagctactgctcatcactaaaccattgttctgtctttacaataagaaaccaaacgcttggggcggggatgtcttcccgccctggttagcaattttttttttgtatgattcatctttcatcatgaaaaaggaactaatatacttcataratcattaataaattattttctcaaatgtctc

SEQ ID NO: 2667 - protein, 52 aa, Brassica napus
  misc_feature: Ceres Clone ID no. 1123182
  misc_feature: Bit score of 100.1 for HMM based on sequences of Figure 21
  misc_feature: Functional Homolog Of SEQ ID NO. 2654
  misc_feature: in Figure 21
MAIPPGLYSGTSSLALVARASAFSVGLLYGSMKLKVLKMTKKPHKVEATAHH

SEQ ID NO: 2668 - protein, 53 aa, Vitis vinifera
  misc_feature: Public GI ID no. 225427800
  misc_feature: Bit score of 110.3 for HMM based on sequences of Figure 21
  misc_feature: Functional Homolog Of SEQ ID NO. 2654
  misc_feature: in Figure 21
MAPPPGPYSGTSTLALVARVSAFSAGLVYGSIKLKYLKSKAKSQKKAEAKSHH

SEQ ID NO: 2669 - DNA, 671 bp, Gossypium hirsutum
  misc_feature: Ceres Clone ID no. 100011527
  misc_feature: Encodes the peptide sequence at SEQ ID NO. 2670
tgattgtttcatctagatctgaaactccgtcgcccacttcccaaacaaagcaaatcgatggcgcctgctcctggaccatactccggcaccagcactcttgctctcgtggcacgtgcatctgctttgtcttttggactcgtttatggtagcattaagctcaagtatctcaaggccaaggcaaggtctcaaaggaaagctgaagcaaaggctcaccactgaagcaggggtggtttttgttcatagttggtttgcatgagtgaatagagtttggtgtaggaataaagcataaaaatagtattgtaccagattttcatttcggcttaaagcttctatggacaatgacatacttgtccccaaattaaattagtattacgaactcggcacttcaagtattagtttatcggttgtcaatggcactaccgatgtttagtgtcttaagttaatgggaaagatgttggatgattatatgcttccatgttcaatgtaataatactcacttattggctcccacaaaaaaaaaaaaaaaaaactcgaggggggtgcctggtaccaattcgccctatagtgagtcgtataacaattcactaggcgtcgtataaaaacgtcgtgactgtgtaaaccttgcgtaaccaattaattgctagaagaaatcaccttttgcaggtgatgta

SEQ ID NO: 2670 - protein, 53 aa, Gossypium hirsutum
  misc_feature: Ceres Clone ID no. 100011527
  misc_feature: Bit score of 110.4 for HMM based on sequences of Figure 21
  misc_feature: Functional Homolog Of SEQ ID NO. 2654
  misc_feature: in Figure 21
MAPAPGPYSGTSTLALVARASALSFGLVYGSIKLKYLKAKARSQRKAEAKAHH

SEQ ID NO: 2671 - DNA, 549 bp, Arabidopsis thaliana
  misc_feature: Ceres Clone ID no. 1347664
  misc_feature: Encodes the peptide sequence at SEQ ID NO. 2672
atcacgaatcgcgatttttttttgagattacggaagcttcgcttgatttgggatttttagggttttctttctccgaagacgactccgagagaccaacagtgatttgacaatgacgctacctccaggtctttactccggcaccagctctcttgctctggtggctcgtgcttcggcttttgggttgggtctcgtctatgggaacatgaagctcaaggtccttaagatcaaatcgatgtcacagaagaaggttgaagccaccgctcatcattaaaccactcttctttctttacaataagatgccaaaagctgggggtgatgtctccccggttagtttgatttcttctttcatgattcatcctttagcataagaaggaacaaatgtgtttttgaaaagcatattatacggttttaagacctttttggagccataattgccattggcttaaaacccgagtcaagaacatcttttccatttgttgtcatccaataacaccgttcacattcacatacacctcacctcttaaccagattatctataacctaagggac

SEQ ID NO: 2672 - protein, 53 aa, Arabidopsis thaliana
  misc_feature: Ceres Clone ID no. 1347664
  misc_feature: Bit score of 105.0 for HMM based on sequences of Figure 21
  misc_feature: Functional Homolog Of SEQ ID NO. 2654
  misc_feature: in Figure 21
MTLPPGLYSGTSSLALVARASAFGLGLVYGNMKLKVLKIKSMSQKKVEATAHH

SEQ ID NO: 2673 - DNA, 471 bp, Glycine max
  misc_feature: Ceres Clone ID no. 679875
  misc_feature: Encodes the peptide sequence at SEQ ID NO. 2674
  misc_feature (112)..(112): n is a, c, t, g, unknown, or other
  misc_feature (455)..(455): n is a, c, t, g, unknown, or other
accctctcactgcggtcccaccttgctggctagggttcgataatcgacaattgtgaagcacaccgttttgttcgtccattttttcctcccttcctctcttcctgcgccgacnactactctcgctcgtaatggcaccaccaccgggaccttattctggtaccagcaccctcgctttggtcgctcgagcttccgctttctcctttggccttgtttatggaaccattaagctcaagtacctcaaggcaaaagccaaatctcatcaaaaagctcaggagaaggctcatcattgaaagcaatgagagatctccggtgttattatctgtccattgatggagtagaatactgaaataattcattacaaggaactgtatcatgttttctcccattttttttttcttctckggtttaagctttggataatcttggagcatcgagtttagtgcgctgaaaatgtncaagattttgccttgt

SEQ ID NO: 2674 - protein, 53 aa, Glycine max
  misc_feature: Ceres Clone ID no. 679875
  misc_feature: Bit score of 110.8 for HMM based on sequences of Figure 21
  misc_feature: Functional Homolog Of SEQ ID NO. 2654
  misc_feature: in Figure 21
MAPPPGPYSGTSTLALVARASAFSFGLVYGTIKLKYLKAKAKSHQKAQEKAHH

SEQ ID NO: 2675 - protein, 52 aa, Picea sitchensis
  misc_feature: Public GI ID no. 116780182
  misc_feature: Bit score of 99.5 for HMM based on sequences of Figure 21
  misc_feature: Functional Homolog Of SEQ ID NO. 2654
  misc_feature: in Figure 21
MAGPGPYSGTSTFALVARVSAFTLGVVYGSMKLSYLKAKAKSHKITEAKGHH

SEQ ID NO: 2676 - DNA, 395 bp, Parthenium argentatum
  misc_feature: Ceres Clone ID no. 1606594
  misc_feature: Encodes the peptide sequence at SEQ ID NO. 2677
cgattcgcctaacgacatttctccgatggcaccacctcccggcccttactccggtaccagcaccctcgctctggtggctcgtgtctcggccttctctgctggactagtttatggaaccttgaagctcaaataccttaaggcaaaggctaactcacaaagaaaagctgcagccaaggcacaccattagaaggagaagtgaatgaggtagttatttatgttttgaataattcttgatgatggtccagagtgagtgtccactcgggtcacatgatatcgttcctatcttttgcttgtaactgttcgattttgaccacaagtttttactcctttcaacatgacaaatggttatacatttggttgacatgaagcataattcaaaagtagatttctgcttg

SEQ ID NO: 2677 - protein, 53 aa, Parthenium argentatum
  misc_feature: Ceres Clone ID no. 1606594
  misc_feature: Bit score of 107.9 for HMM based on sequences of Figure 21
  misc_feature: Functional Homolog Of SEQ ID NO. 2654
  misc_feature: in Figure 21
MAPPPGPYSGTSTLALVARVSAFSAGLVYGTLKLKYLKAKANSQRKAAAKAHH

SEQ ID NO: 2678 - DNA, 483 bp, Papaver somniferum
  misc_feature: Ceres Clone ID no. 1628000
  misc_feature: Encodes the peptide sequence at SEQ ID NO. 2679
gtaactttctcgctctccagatctctaatcagcagtagaagaagaagattacgaatggcgctcccaataggaccttactcaggcacaagctcactcgctttggttgctcgtgcttcagctttcacctttggtctcgtttatggaagcgtgaagcttaaggttcttcaggctaaaaagaagtcgccagctaaggctcatcattaaagaatgcacttcaccatggcatgtttggcctaagtatgttggaagttattttgtaacaagtagggaaaaaataataattgttcgacagtaaatccactctttttgttcttgtttaatttccttttggctctaattggcagttagctgtccgcatgccaatgacttgaggatggttctcttcatcatggttgctagagtagttcgaaaatcatgttgcagactacttttctgtgtatttttcaattttaagtagttttcaatctacagacagtattctcc

SEQ ID NO: 2679 - protein, 49 aa, Papaver somniferum
  misc_feature: Ceres Clone ID no. 1628000
  misc_feature: Bit score of 93.1 for HMM based on sequences of Figure 21
  misc_feature: Functional Homolog Of SEQ ID NO. 2654
  misc_feature: in Figure 21
MALPIGPYSGTSSLALVARASAFTFGLVYGSVKLKVLQAKKKSPAKAHH

SEQ ID NO: 2680 - DNA, 461 bp, Zea mays
  misc_feature: Ceres Clone ID no. 1710212
  misc_feature: Encodes the peptide sequence at SEQ ID NO. 2681
atataaggcccagcccaccgattctcctcttctgtcttctcccctgcgacaaagacgacgcaagtccctactcctccaaacccttgccgactcagatccagcttcctcgcaccgccgtcgccatgccgttcactccaggcccctactctggcgtcaacaccctcgcccttgtggcgagggcgtcggcctttggcgtcggtgtcgtctacgggagcatcaagctctcaatcctcaaggtaacaaaacctaaaaaggaggaagcgcatgatcatcaccaaggacgacaaggctgctacattttaattcccacatatggaaggatgttataaattggcagtgcaccccttctccatacgtacagtttcgtttatgatttgtggacctgtctgtaacatacctgctttttttttgtgttgtaataaattcttatacaatgacatgaaatcaggaagtggaaaagc

SEQ ID NO: 2681 - protein, 68 aa, Zea mays
  misc_feature: Ceres Clone ID no. 1710212
  misc_feature: Bit score of 96.8 for HMM based on sequences of Figure 21
  misc_feature: Functional Homolog Of SEQ ID NO. 2654
MPFTPGPYSGVNTLALVARASAFGVGVVYGSIKLSILKVTKPKKEEAHDHHQGRQGCYILIPTYGRML

SEQ ID NO: 2682 - DNA, 474 bp, Zea mays
  misc_feature: Ceres Clone ID no. 1649408
  misc_feature: Encodes the peptide sequence at SEQ ID NO. 2683
gtcttctcccctgcgtcaaagacgacgcaagcccttgcctctccctactccaaaccctcgccgactcagatccagcttcctcgcaccgccgtcgccatgccgttcactccaggcccctactctggcgtcagcaccctcgcccttgtggcgagggcgtcggcctttggtgtcggtgtcgtctacgggagcatcaagctctcaatcctcaaggtcacaaaacctaaaaaggaggaagtgcatgatcatcactaaggatgacagggctgctacatgttaattcccatatatgcaaggatgttataaaattggcagtgcaccccttatccatacgtgcaatttcgtttatgatttgtggacctgtctgtaacatacctgctgtttttttttgtgttgtaataaattcttatacaatgactgaatgacatgaaatcaggaagtggaaaaagcaatagtaataattgcaagtcgttcgac

SEQ ID NO: 2683 - protein, 51 aa, Zea mays
  misc_feature: Ceres Clone ID no. 1649408
  misc_feature: Bit score of 97.2 for HMM based on sequences of Figure 21
  misc_feature: Functional Homolog Of SEQ ID NO. 2654
MPFTPGPYSGVSTLALVARASAFGVGVVYGSIKLSILKVTKPKKEEVHDHH

SEQ ID NO: 2684 - DNA, 399 bp, Panicum virgatum
  misc_feature: Ceres Clone ID no. 1964117
  misc_feature: Encodes the peptide sequence at SEQ ID NO. 2685
acgcacgaccaaccaaagcctcctccaaaccctcgccgactcagcagatccctccgccgccgccgccatgccgttcaccccgggcccctactccggcgtcagcaccctcgccctcgtggcgcgagcgtcggccttcggcgtcggcgtcgtctacgggaccatcaagctctcggtcctcaaggccacaaaacctaaaaaggaggatgctcatgccgctgctcaccactaaggactaggatgcaacatggtggctccaagggaaggatgtgatctggaaatgtacccgtccttgatgcgagcagttggtttatgatttgtgtagacgtcttgtttgaaacccacatgggaggttatcttaattttggttcataataagttttaaattgacttgaaakccgc

SEQ ID NO: 2685 - protein, 53 aa, Panicum virgatum
  misc_feature: Ceres Clone ID no. 1964117
  misc_feature: Bit score of 97.1 for HMM based on sequences of Figure 21
  misc_feature: Functional Homolog Of SEQ ID NO. 2654
MPFTPGPYSGVSTLALVARASAFGVGVVYGTIKLSVLKATKPKKEDAHAAAHH

SEQ ID NO: 2686 - DNA, 505 bp, Triticum aestivum
  misc_feature: Ceres Clone ID no. 660530
  misc_feature: Encodes the peptide sequence at SEQ ID NO. 2687
accgaaagagagagagaagagaagaggagccctccaccccgccgtcgcagcgccaaccaaaccctcgtcgtcgtcccggatcccgccgtagccgccgccgccgcagccatgccgttcaccccgggaccctactccggcaagagcaccctcgccctcgtggccagggtctccgcggtcggcgtcggcgtcgtctacggctccatcaagctcggcatcctcaagatgaccaagcccaaggaggaggcagcagctcatcactgaggacaagtagctccagcgggttgacgccgtagattcacaatgtaccttccatatgtgcattcggttctgtgatttgtgtcttgaaacccaaaaaaccccagacccgtgtgggagctgaaccttagttttttgcttgtggaaaataatatcctcggctgaatcgacttgaaatcaggaaagagtgaaacttaaaatcctttggtgtggttctttcgattcagatccagtttttgttatgccatct

SEQ ID NO: 2687 - protein, 50 aa, Triticum aestivum
  misc_feature: Ceres Clone ID no. 660530
  misc_feature: Bit score of 92.6 for HMM based on sequences of Figure 21
  misc_feature: Functional Homolog Of SEQ ID NO. 2654
MPFTPGPYSGKSTLALVARVSAVGVGVVYGSIKLGILKMTKPKEEAAAHH

SEQ ID NO: 2688 - DNA, 527 bp, Triticum aestivum
  misc_feature: Ceres Clone ID no. 1330898
  misc_feature: Encodes the peptide sequence at SEQ ID NO. 2689
acctggatcccacccccctttatcatccctctggtcgccttctcacccacgaaagagagagagagagagaagaggagcactcgaccccgccgtcgcagcgccaaccaaaccctcgtcgtcgtctccgatcccgccgtcgccgccgcagccatgccgttcaccccgggaccctactccggcaagagcaccctcgccctcgtcgccagggtctccgccgtcggcatcggcgtcgtctacggctccgtcaagctcggcatcctcaagatgaccaagcccaaggaggaagcagctgctcatcactgaggacaagtagctccagcgggttgacgccgtagattcgcaatgtaccttctatatgcccatccggttctgtgatttgtgtcttgaaacccaaaaaaccccaggcccatgtgggagctgaaccttagttttttgcttggtggaaaataatatcctcggctgaatcgacttgaaatcaggaagagtgaaactttaaatcatttccttttgcgtggtgctgcgatccg

SEQ ID NO: 2689 - protein, 50 aa, Triticum aestivum
  misc_feature: Ceres Clone ID no. 1330898
  misc_feature: Bit score of 92.1 for HMM based on sequences of Figure 21
  misc_feature: Functional Homolog Of SEQ ID NO. 2654
MPFTPGPYSGKSTLALVARVSAVGIGVVYGSVKLGILKMTKPKEEAAAHH

SEQ ID NO: 2690 - DNA, 524 bp, Musa acuminata
  misc_feature: Ceres Clone ID no. 1751352
  misc_feature: Encodes the peptide sequence at SEQ ID NO. 2691
caccccttactgcttttagggttttcatcctccaccctcctcccctttcctcattttccctctaccgctccttccatggcgatacccggcccttactccggcgtcagcaccctcgcgttcgttgctcgtgcttcggcgttcgcgttcggtgtcgtttatggaagcgtcaagctatcgtatctcccggtcaaggcaaagtttcacaagaaagaagaggcaaaaggccaccactgaggaacagaatgcggtgtgtggtgattctttaactgcatgattgaatttagttatcaatttctactgttttggtgtacttctgcctccatggctgattatacctgttgggttcctgaagcacatttcaccaggatcaataagaagatttttgacacttagttctacttttccaataactgttccaaatgatgtcagctgaaaactggatagttgtatttcctttgatattttttctacaatgtcttcatatgctaatggcgcttatcaataaaatttaggttccttgtgat

SEQ ID NO: 2691 - protein, 52 aa, Musa acuminata
  misc_feature: Ceres Clone ID no. 1751352
  misc_feature: Bit score of 100.7 for HMM based on sequences of Figure 21
  misc_feature: Functional Homolog Of SEQ ID NO. 2654
MAIPGPYSGVSTLAFVARASAFAFGVVYGSVKLSYLPVKAKFHKKEEAKGHH

SEQ ID NO: 2692 - DNA, 373 bp, Brassica napus
  misc_feature: Ceres Clone ID no. 1068004
  misc_feature: Encodes the peptide sequence at SEQ ID NO. 2693
attgcgattgatttgggatcatattagggttgttttcttctcttctctgaatcaatggcgttgcctccaggactttactccggcaccagctcccttgctctcgtggctcgtgcttcggcgttcagcgtgggtctcctctacgggagcatgaagctcaaagtcttgaagatgacaaagaagccacacaaggttgaagctactgctcatcactaaaccattgttctgtctttacaataagaaaccaaacgcttggggcggggatgtcttcccgccctggttagcagtctttttcttttgtcttctcattatttatcatgaaaaaggaactaatatacttcatagatcattaataaattattttctcgacactctc

SEQ ID NO: 2693 - protein, 52 aa, Brassica napus
  misc_feature: Ceres Clone ID no. 1068004
  misc_feature: Bit score of 99.6 for HMM based on sequences of Figure 21
  misc_feature: Functional Homolog Of SEQ ID NO. 2654
MALPPGLYSGTSSLALVARASAFSVGLLYGSMKLKVLKMTKKPHKVEATAHH

SEQ ID NO: 2694 - DNA, 162 bp, Populus balsamifera subsp. trichocarpa
  misc_feature: Ceres Annot ID no. 1442596
  misc_feature: Encodes the peptide sequence at SEQ ID NO. 2695
atgactccacctccaggtccttactccggcgccagcactctcgctctggtggcgcgtgcatcggcattcagttttggcttggtttatggaagtgtgaagctcaagattctcaagatgaaagtgaattcgcgtaacaaggcggaagctaaggcacatcactga

SEQ ID NO: 2695 - protein, 53 aa, Populus balsamifera subsp. trichocarpa
  misc_feature: Ceres Annot ID no. 1442596
  misc_feature: Bit score of 108.6 for HMM based on sequences of Figure 21
  misc_feature: Functional Homolog Of SEQ ID NO. 2654
MTPPPGPYSGASTLALVARASAFSFGLVYGSVKLKILKMKVNSRNKAEAKAHH

SEQ ID NO: 2696 - DNA, 524 bp, Gossypium hirsutum
  misc_feature: Ceres Clone ID no. 1898903
  misc_feature: Encodes the peptide sequence at SEQ ID NO. 2697
gttttcccttcagccactgcagactatatttccattgcatctccatcactcattttccgatcacacaaacaaaaaccaaagccatggcgccgccacctggaccttactctggcaccagcactctcgctctcgtggctcgtgcatctgctttttcttttggacttgtttatgggaactttaagctcaagtacctcaagatgaaggcaaagtctcaaaggaaagctgaagcaaaggcacaccattgaagcagggggggggtcttgttcatagttcaattgcatgcgtgacctgaggttttttctttttgtcgtaataatgcattaacaatgggattataccagtttttcattttggcctgcagctttttatggaccatggtgaactgcctttaataactttttcgggtagttatcatcttagccattcagggtttgtttatttcctgtagttaaacatgcaagctgctggggtgattatatattctccgcagttctaattaataaattcagtctcttttttggctc

SEQ ID NO: 2697 - protein, 53 aa, Gossypium hirsutum
  misc_feature: Ceres Clone ID no. 1898903
  misc_feature: Bit score of 112.8 for HMM based on sequences of Figure 21
  misc_feature: Functional Homolog Of SEQ ID NO. 2654
MAPPPGPYSGTSTLALVARASAFSFGLVYGNFKLKYLKMKAKSQRKAEAKAHH

SEQ ID NO: 2698 - DNA, 501 bp, Arabidopsis thaliana
  misc_feature: Ceres Clone ID no. 266374
  misc_feature: Encodes the peptide sequence at SEQ ID NO. 2699
accatcacgaatcgcgatttttttttgagattacggaagcttcgcttgatttgggatttttagggttttctttctccgaagacgactccgagagaccaacagtgatttgacaatgacgctacctccaggtctttactccggcaccagctctcttgctctggtggctcgtgcttcggcttttgggttgggtctcgtctatgggaacatgaagctcaagatcaaatcgatgtcacagaagaaggttgaagccaccgctcatcattaaaccactcgttctttctttacaataagatgccaaaagctgggggtgatgtctccccggttagtttgatttcttctttcatgattcatcctttagcataagaaggaacaaatgtgtttttgaaaagcatattatacggttttaagacctttttggagccataattgccattggcttaaaacccgagtcaagaacatctttccatttgttgtcatccaataacaccgttcacattcacc

SEQ ID NO: 2699 - protein, 50 aa, Arabidopsis thaliana
  misc_feature: Ceres Clone ID no. 266374
  misc_feature: Bit score of 89.5 for HMM based on sequences of Figure 21
  misc_feature: Functional Homolog Of SEQ ID NO. 2654
MTLPPGLYSGTSSLALVARASAFGLGLVYGNMKLKIKSMSQKKVEATAHH

SEQ ID NO: 2700 - DNA, 477 bp, Arabidopsis thaliana
  misc_feature: Ceres Clone ID no. 120248
  misc_feature: Encodes the peptide sequence at SEQ ID NO. 2701
ctggtctttcattatcgcgaatctgagatttcggaagattcgatcgatttgggggttttagggtttaatctcaactgctaatcaatggcgccacctccaggactttactccggtaccagcactcttgctctggttgctcgtgcttcggctttcgggttgggtctcatctacggcaacatcaagctcaaggctttaaagataaagaagaattcgcagattaaggccgaagccaaggctcatcactaaaccaactcttcttctccttctcaataagattatgaagccaagtgattgttatctctgaatgtagctcttttcctccttaagctatatctccctcggtgacattttttccatctttctgtttttttaatcaaaatcttctgtctgacaaagcaatcgtatacccgttttggtttaaacctgagttcttctttggtactttcctgctattcaataaacaccatatttttatcg

SEQ ID NO: 2701 - protein, 53 aa, Arabidopsis thaliana
  misc_feature: Ceres Clone ID no. 120248
  misc_feature: Bit score of 103.2 for HMM based on sequences of Figure 21
  misc_feature: Functional Homolog Of SEQ ID NO. 2654
MAPPPGLYSGTSTLALVARASAFGLGLIYGNIKLKALKIKKNSQIKAEAKAHH

SEQ ID NO: 2702 - DNA, 168 bp, Populus balsamifera subsp. trichocarpa
  misc_feature: Ceres Annot ID no. 1513988
  misc_feature: Encodes the peptide sequence at SEQ ID NO. 2703
atggcgccgcctcctggaccttactctggcaccagcactctcgctctggtggctcgtgtttctgctttctctttgggtctcgtttacgggagtgtgaagcttaagtatctccaggcgaaggcaaagtcacaaaagaaagctgaagcaaaggcaaaggcgcatcactga

SEQ ID NO: 2703 - protein, 55 aa, Populus balsamifera subsp. trichocarpa
  misc_feature: Ceres Annot ID no. 1513988
  misc_feature: Bit score of 104.7 for HMM based on sequences of Figure 21
  misc_feature: Functional Homolog Of SEQ ID NO. 2654
MAPPPGPYSGTSTLALVARVSAFSLGLVYGSVKLKYLQAKAKSQKKAEAKAKAHH

SEQ ID NO: 2704 - protein, 55 aa, Populus balsamifera subsp. trichocarpa
  misc_feature: Public GI ID no. 118481824
  misc_feature: Bit score of 104.3 for HMM based on sequences of Figure 21
  misc_feature: Functional Homolog Of SEQ ID NO. 2654
MAPPPGPYSGTSTLALVARVSAFSLGLVYGSVKLKYLQAKARSQKKAEAKAKAHH

SEQ ID NO: 2705 - DNA, 497 bp, Brassica napus
  misc_feature: Ceres Clone ID no. 872136
  misc_feature: Encodes the peptide sequence at SEQ ID NO. 2706
ctcgcgaatctgagattgtcggaagatacgatcgaattcggggtcagggtttttctctgccgacgaactgcttaataatctgatcaatgacgccgcctccaggactttactccggtcgcagcactcttgccctggtggctcgtgcttcggctttcgggctgggtctcatctacggcaacgtcaagctcaaggctttgaagataaagaagaactcacagattaaggctgaagccaaggcggaagccaaggctcatcactaaaccgaacatctttctctaccttcaaaataagattatgaagaatcccagtgaacgttccacaaatgtagctgtttcttcttcttgagctatatctcccttggtgacatttttttggttttttctatgttcattttggctatcgttgacgaagaagagcaactacttttgtctgcaaaagcaatcataataccattttgattaaacctgatgctatgaacacccatattgtttcttctc

SEQ ID NO: 2706 - protein, 57 aa, Brassica napus
  misc_feature: Ceres Clone ID no. 872136
  misc_feature: Bit score of 90.6 for HMM based on sequences of Figure 21
  misc_feature: Functional Homolog Of SEQ ID NO. 2654
MTPPPGLYSGRSTLALVARASAFGLGLIYGNVKLKALKIKKNSQIKAEAKAEAKAHH

SEQ ID NO: 2707 - DNA, 2440 bp, Panicum virgatum
  misc_feature: Ceres Clone ID no. 1789564
  misc_feature: Encodes the peptide sequence at SEQ ID NO. 2708
ccgtcgccgtgctactactacccctccgccggctcagtagaaaagccccccctcgcccattccttcccatcagccccggccgtttgccactctgcattgctccctcaggatttcgaaagcacaaacacggaggacatggcgacaccgtacaaacctaagaacatcctcatcactggggctgctgggtttattgcctcccatgtcgcgacccgcatcgtgaagaagtaccctgactacaagatcgtcgtccttgacaagcttgactactgctccaacctgaagaacctgctctccgtgagctcgtcgccaaactttaagtttgtcaagggcgacatcgcgagcgccgaccttgtcaacttcatcctcgtcacagagaacattgacactgtgatgcactttgcagcccagacacacgtcgacaattcctttgggaactccttcgagttcaccaagaacaatatttatggtacacatgtccttcttgaggcctgccggcagatcaccggtcagatcaagaggttcatccatgtcagcactgatgaggtttatggagagacagatgaggatgcagttgttggcaaccatgagatgtcacagctgctccccacaaacccctatgcagccaccaaagccggagcagagatgcttgtcatggcctatgggagatcctatggtcttccagtcatcactactcggggaaacaatgtctatggccctaaccaattcccggagaagctcatcccaaagttcattctcttggccatgagagggcaaccccttccaatccatggtgatggatccaatgtccggagctacctctattgtgaggatgtcgccgaggcatttgaggtcattcttcatcgtggagaggttggacatgtttataacattgggacaaagaaagagaggacggtcatgaatgtggcaaaagatatatgcaagcttttcaatctggaagccgacaaagctatcaagtttgttgacaacaggcctttcaatgatcagaggtacttcctcaacaatgagaagctcatgagccttggatggtccgagcacactcactgggaggagggcctgaggaagacaatggaatggtatgtgtctaattccgactactggggtgatgtttctggggcattgttgcctcatccaaaggcaatggtgatgcctggagggtatgagggctctaaggagattaaaggaatacttgctcaatttaataacattcagacaaaggtagctccaacatcagatagtgttctggaaacacatcccttcaaattcttgatatatggtcggactggatggattggtggacttcttggaaaaatatgtgagaagcagggaatccaatatgaatatggaaaaggtcgcttgcaagagcgttcttcactcatcctagacatccaaactattaagccaacacatgtcttcaatgctgctggtgttactggcagacccaatgttgactggtgtgaatctcacaagccagaaaccatccgtaccaatgttgttggtaccttgactctagctgatgtgtgtagggagcatggcttattgatgataaactatgccacagggtgcatattcgaatatgatgcacaacatcctgaaggatcaggtatcggcttcaaagaggaggacacaccaaattttactggttcattttactcgaagaccaaggcaatggtcgaagagctactgaaggaatatgagaatgtctgcaccctgcgtgtccggatgcccatatcttctgaccttagcaacccccggaatttcgtgacaaagatcagccgttacgacaaggtggtgaacatcccaaacagcatgacaatactggatgagctcctgccgatctcaatcgagatggccaagaggaacctgcggggcatctataatttcaccaaccctggcgtcgtcagccacaacgaggtcctggagatgtacaagcagtacattgaccctagcttcaagtggacaaacttcaccctcgaggagcaggccaaggtcatcgtcgcgccccggagcaacaacgagttggacaccaccaagctggagcaggagttccccgagttgctgtcgatcaaagactcgttgatcaagtacgtcttcgagccaaacaggaaggtgccagcaaactgaaggccagcagagccgatacaacagaaaatgcagcagccattattagcttgtagcgcatccattcgtcgtgaacggttcatcagaatttgtacttgttatactcggcagcatatctccgctatagtttgattcagagctgctttgtagtttttggcaacatggcgattccccaatttgctgcagagaccatatgtactacttgctgagttcaaatgttcagtatgtgtatttggtttcaattcactgctgacatatgtatttggcaacctgttctatcatgaataattctctaatattc

SEQ ID NO: 2708 - protein, 668 aa, Panicum virgatum
  misc_feature (10)..(253): Pfam Name: Epimerase Pfam Description: NAD dependent epimerase/dehydratase f
  misc_feature (381)..(659): Pfam Name: RmlD_sub_bind Pfam Description: RmlD substrate binding domain
  misc_feature: Ceres Clone ID no. 1789564
  misc_feature: Bit score of 1855.4 for HMM based on sequences of Figure 28
  misc_feature: Functional Homolog Of SEQ ID NO. 2708
  misc_feature: in Figure 28
MATPYKPKNILITGAAGFIASHVATRIVKKYPDYKIVVLDKLDYCSNLKNLLSVSSSPNFKFVKGDIASADLVNFILVTENIDTVMHFAAQTHVDNSFGNSFEFTKNNIYGTHVLLEACRQITGQIKRFIHVSTDEVYGETDEDAVVGNHEMSQLLPTNPYAATKAGAEMLVMAYGRSYGLPVITTRGNNVYGPNQFPEKLIPKFILLAMRGQPLPIHGDGSNVRSYLYCEDVAEAFEVILHRGEVGHVYNIGTKKERTVMNVAKDICKLFNLEADKAIKFVDNRPFNDQRYFLNNEKLMSLGWSEHTHWEEGLRKTMEWYVSNSDYWGDVSGALLPHPKAMVMPGGYEGSKEIKGILAQFNNIQTKVAPTSDSVLETHPFKFLIYGRTGWIGGLLGKICEKQGIQYEYGKGRLQERSSLILDIQTIKPTHVFNAAGVTGRPNVDWCESHKPETIRTNVVGTLTLADVCREHGLLMINYATGCIFEYDAQHPEGSGIGFKEEDTPNFTGSFYSKTKAMVEELLKEYENVCTLRVRMPISSDLSNPRNFVTKISRYDKVVNIPNSMTILDELLPISIEMAKRNLRGIYNFTNPGVVSHNEVLEMYKQYIDPSFKWTNFTLEEQAKVIVAPRSNNELDTTKLEQEFPELLSIKDSLIKYVFEPNRKVPAN

SEQ ID NO: 2709 - DNA, 2001 bp, Sorghum bicolor
  misc_feature: Ceres Annot ID no. 8726940
  misc_feature: Encodes the peptide sequence at SEQ ID NO. 2710
atggcgaggccttacaagcctaagaatatcctcattacaggagctgctggctttatcgcatcccatgtcgcgatccgtgttaccaagaagtaccccgattacaagatcgttgtccttgacaaacttgactactgctctaatctgaagaacctgctccctgtgagctcgtcaccaaacttcaagtttgtcaagggagatattgcaagcgctgatcttgtcaacttccttcttgtcacggagaaaattgacaccataatgcacttcgcagcccagacacatgttgacaattcatttgggaattctttcgaatttaccaagaacaatatttatggtacacatgttcttcttgaggcctgcaggattactggtcagatcaagaggttcatccatgtcagcactgatgaggtctatggggagactgatgaggatgcagttgttgggaaccatgaagcatcacagctgcttcccacaaacccatatgcagccaccaaagcgggagcagagatgcttgtcatggcatatgggagatcctatggacttccggttatcacctctcgaggaaacaatgtctttggccccaatcagtttcctgagaagcttatcccaaagtttattcttttggcaatgagaggggagccactccctatccatggtgatggaggcaatgtccgtagctacatctattgtgaggatgttgcggaggcatttgaggtcatcctacatcatggagaagttggacatgtgtataatattggaacaaagagagagaggacagtaattgatgtagcaaaagatgtttgtaagcttttcagtcttgaagctggcaaagtcatcatgtttgtcgagaacagacctttcaatgaccagaggtatttcttggacgatgagaagctcaagagccttggatgggctgagcgcaccccatgggaggaaggcttaaaaaagacaatggaatggtatgtagcaaattctgattattggggtgatgtttctggggccttactgcctcatccaaggacattgatgatgccagggtacgagggctctgaagagattaaaggaattctcagtcagttcaataacattcaaacaaaggtcacttcaacattggatactgctctagaaacgcatgccttcaagttcctggtatatggcaggacaggatggatcggtggacttcttggaaaaatatgtgagaagaaaggaattccatatgagtatggaaaaggccgcttgcaagaacgttcttcactcaacctggatatccaaactattaagccaacacatgtcttcaatgccgctggtgttactggaaggcccaatgttgactggtgtgagtcacacaaaccagacaccattcgtaccaatgttgtgggcaccttaaatctagcagacgtatgtagggagcatggcttattgatgatgaactacgcgactgggtgcatatttgagtatgatgcagatcatcctgaagggtcaggtattggtttcaaagaggaagatacaccaaattttacaggttcattctactcgaagacgaaggcaatggtcgaggagctattgagggagtatgagaatgtctgcactctgcgagttcgaatgccaatatcctctgacctcaacaacccccgaaactttgtgacaaagatcagccgttacaacaaggtggtgaacatccccaacagcatgacgatgttggacgagctcctgcctatctcagtggagatggcaaagaggaacctgcggggcatctataacttcaccaaccctggtgttgtcagccacaacgagatcctagagatgtacaagcagtacatcgaccctagcttcaagtggacaaacttcacccttgaggagcaggccaaggttattgtcgcgccacgaagcaataatgagatggatgcaaccaagctgaagaaagagttccccgaactgctatcgatcaaagactcgttgatcaagtttgtctttgagcccaataggaaggtgcctataaactga

SEQ ID NO: 2710 - protein, 666 aa, Sorghum bicolor
  misc_feature (10)..(252): Pfam Name: Epimerase Pfam Description: NAD dependent epimerase/dehydratase f
  misc_feature (379)..(657): Pfam Name: RmlD_sub_bind Pfam Description: RmlD substrate binding domain
  misc_feature: Ceres Annot ID no. 8726940
  misc_feature: Bit score of 1857.2 for HMM based on sequences of Figure 28
  misc_feature: Functional Homolog Of SEQ ID NO. 2708
  misc_feature: in Figure 28
MARPYKPKNILITGAAGFIASHVAIRVTKKYPDYKIVVLDKLDYCSNLKNLLPVSSSPNFKFVKGDIASADLVNFLLVTEKIDTIMHFAAQTHVDNSFGNSFEFTKNNIYGTHVLLEACRITGQIKRFIHVSTDEVYGETDEDAVVGNHEASQLLPTNPYAATKAGAEMLVMAYGRSYGLPVITSRGNNVFGPNQFPEKLIPKFILLAMRGEPLPIHGDGGNVRSYIYCEDVAEAFEVILHHGEVGHVYNIGTKRERTVIDVAKDVCKLFSLEAGKVIMFVENRPFNDQRYFLDDEKLKSLGWAERTPWEEGLKKTMEWYVANSDYWGDVSGALLPHPRTLMMPGYEGSEEIKGILSQFNNIQTKVTSTLDTALETHAFKFLVYGRTGWIGGLLGKICEKKGIPYEYGKGRLQERSSLNLDIQTIKPTHVFNAAGVTGRPNVDWCESHKPDTIRTNVVGTLNLADVCREHGLLMMNYATGCIFEYDADHPEGSGIGFKEEDTPNFTGSFYSKTKAMVEELLREYENVCTLRVRMPISSDLNNPRNFVTKISRYNKVVNIPNSMTMLDELLPISVEMAKRNLRGIYNFTNPGVVSHNEILEMYKQYIDPSFKWTNFTLEEQAKVIVAPRSNNEMDATKLKKEFPELLSIKDSLIKFVFEPNRKVPIN

SEQ ID NO: 2711 - protein, 676 aa, Zea mays
  misc_feature (20)..(262): Pfam Name: Epimerase Pfam Description: NAD dependent epimerase/dehydratase f
  misc_feature (396)..(670): Pfam Name: RmlD_sub_bind Pfam Description: RmlD substrate binding domain
  misc_feature: Public GI ID no. 212274887
  misc_feature: Bit score of 1861.3 for HMM based on sequences of Figure 28
  misc_feature: Functional Homolog Of SEQ ID NO. 2708
  misc_feature: in Figure 28
MDSKSNHTGAMARPYKPKNILITGAAGFIASHVAIRITKKYPDYKIIVLDKLDYCSNLKNLLPVSSSPNFKFVKGDIASVDLVNFLLVTENIDTIMHFAAQTHVDNSFGNSFEFTKNNIYGTHVLLEACRISGQIKRFIHVSTDEVYGETDEDAVVGNHEASQLLPTNPYAATKAGAEMLVMAYGRSYGLPVITTRGNNVYGPNQFPEKLIPKFILLAMRGEPLPIHGDGVNVRSYLYCEDVAEAFEVILHHGEVGHVYNIGTKRERTVLDVAKDVCRLFNLEPDKVIMFVENRPFNDQRYFLDDEKLKSLGWAERTPWEEGLKKTMEWYVANSDYWGDVSGALLPHPRTLMMPGCEGSEEIKGILSRFNNIQTKVGSTSDNAPEPHAFKFLIYGRTGWIGGLLGKICEKKGIPYEYGNGRLQERSSLVLDIQTIKPTHVFNAAGVTGRPNVDWCESHKPDTIRTNVVGTLNLADVCRKHGLLMMNYATGCIFEYDAHHPEGSGIGFKEEDTPNFTGSFYSKTKAMVEELLKEYENVCTLRVRMPISSDLSNPRNFVTKISRYNKVVNIPNSMTILDELLPISVEMAKRNLRGIYNFTNPGVVSHNEILEMYKQYIDPSFKWTNFTLEEQAKVIVAPRSNNEMDATKLKNEFPELLSIKDSLIKYVFEPNRKVPTD

SEQ ID NO: 2712 - protein, 675 aa, Vitis vinifera
  misc_feature (9)..(251): Pfam Name: Epimerase Pfam Description: NAD dependent epimerase/dehydratase f
  misc_feature (388)..(666): Pfam Name: RmlD_sub_bind Pfam Description: RmlD substrate binding domain
  misc_feature: Public GI ID no. 225461808
  misc_feature: Bit score of 1914.9 for HMM based on sequences of Figure 28
  misc_feature: Functional Homolog Of SEQ ID NO. 2708
  misc_feature: in Figure 28
MATHTPKNILITGAAGFIASHVANRLIRNYPDYKIVVLDKLDYCSNLKNLLPSKSSPNFKFVKGDIGSADLVNFLLITESIDTIMHFAAQTHVDNSFGNSFEFTKNNIYGTHVLLEACKVTGQIRRFIHVSTDEVYGETDEDAVVGNHEASQLLPTNPYSATKAGAEMLVMAYGRSYGLPVITTRGNNVYGPNQFPEKLIPKFILLAMRGKPLPIHGDGSNVRSYLYCEDVAEAFEVILHRGEVGHVYNIGTKKERRVIDVAKDVCNLFSMDPETSIKFVENRPFNDQRYFLDDQKLKILGWSERTTWQEGLKKTMEWYINNPNWWGDVSGALLPHPRMLMMPGGIERHFDGSEDSDSTASPVSSNLNQTRMVVPVPKSVSSPRKPSLKFLLYGRTGWIGGLLGKLCEKQGIPYEYGRGRLEDRASLLADIQNVKPTHVFNAAGVTGRPNVDWCESHKPETIRANVAGTLTLADVCREHGLLMMNFATGCIFEYDAAHPEGSGIGFKEEDTPNFAGSFYSKTKAMVEELLKEFDNVCTLRVRMPISSDLNNPRNFITKISRYNKVVNIPNSMTVLDELLPISIEMAKRNCRGIWNFTNPGVVSHNEILEMYKSYIDPNFKWANFTLEEQAKVIVAARSNNEMDASKLKNEFPELLPIKDSLIKYVFEPNQKSLAA

SEQ ID NO: 2713 - DNA, 2616 bp, Gossypium hirsutum
  misc_feature: Ceres Clone ID no. 1920439
  misc_feature: Encodes the peptide sequence at SEQ ID NO. 2714
gcaatttccctctccttcaaagccttttctcttctcctctgaaatctcgctctaagatttcgtcgtttatctttctccatctggattttgattgagctctctcttctttcgtcttaattggtttcactatgtcttcttatacccctaagaacatcctcataactggggcagctggttttattgcgtcacatgtcgctaaccggctcataaggaactacccagactacaagattgttgtgcttgacaagcttgattactgctcgaacctgaaaaacctccttccttccaagtcatctccgaactttaagtttgtgaaaggtgacattggtagtgctgaccttgttaactacctccttattaccgagtctatcgacacaataatgcactttgcagcccagactcatgttgataactcgtttggaaacagctttgagtttaccaagaacaatatctatggcactcatgtcttgcttgaagcttgcaaagtcactggtcaaatcaggaggttcatccatgtcagcactgatgaggtttatggtgagacggatgaggatgctgttgtaggaaaccatgaggcttcccaacttctcccaacaaacccgtactctgctacaaaagctggtgctgaaatgcttgttatggcgtatggtaggtcatatgggctgcctgtgataacaacccgtggaaacaacgtttatggtcccaaccagttccctgaaaagttgattccaaagttcattctcctagcaatgaggggaaagactttaccaattcacggtgatggttctaatgtgaggagttatttatactgtgaggatgtggccgaggcatttgaagtcattcttcacaagggtgaagttggccatgtttataatattggaacaaagaaggagaggagagtgattgatgtggccaaagatatctgtaagcttttctcgatggatccagagaccagcatcaagtttgttgaaaacagaccattcaatgaccagaggtattttcttgatgatgagaagctgaagaacttgggatggtccgagcaaactgtatgggaagaggggctgaagaagaccattgaatggtacactcagaatcccgaatggtggggcgatgtgtctggtgcattgcttcctcaccctagaatgctgatgatgcctggtgggagacacttcgattctgaagagggaaaaggtacatcatttgcaagtggacctaatcagacccgaatggtggttccaaccttcaaaactagtagcagcacgcaaaaaccagccttgaagttcttgatctatggcaggactggctggattggaggtctgcttggtcagttatgtgagaaacaaggtattccctttgaatatggaagaggacgcttggaagatcgttcatcccttatggcagatattcagaatataaagccaacccatgtttttaatgctgctggtgtgactggtaggcccaatgttgattggtgtgaatctcacaaaacagaaacaattcgcaccaatgtggctggaaccttgaccttagcagatgtttgcagagaacatgggcttttgatgatgaattttgctacagggtgtatattcgagtacgatgcaggacatcctgagggctccggcattgggtataaagaggaagacaaacccaatttcactggttccttctattcaaaaaccaaggctatggttgaagagctgttgaaagaatatgacaacgtctgcactctcagagttcgaatgccgatctcatctgacctaaacaaccctcgtaactttattaccaagattgcacgctacaacaaggtggtcaacattcccaacagcatgacaatcttggatgaacttctgcctatttctatcgagatggctaaaaggaacttgaacggtatctggaactttacaaaccctggggttgtaagccacaatgagatcctggagatgtataaggcttacattgacccaaagtttcagtgggtgaacttcacattggaagaacaagccaaggttatagttgcccctcgaagcaataatgagatggacgcatccaagttgaagaacgagttccccgatctgctaccaatcaaggaatcactgattaagtatgtctttgaacccaacaagagaacctgagccttttgagcagcagtttacaggaatagaattcggtattatcctatgttttttcttcatttagttattgcctggaatatcttttcagtttaattcatttgttataatcttgtcttccacctcattagtttccactagataactcttaaggtgttactattagatttaaaccattcattgttagtagctgcaccaagcagtatcctagtctgtacgtccattcttgaagaaacaatctataggtgctttacaaattgtcatctgcaggctgacaggtgtattatttggcattacattagttgaatgttatgactttcaacagtcacctactggtctatgatggaggaaattccatctatctcttattactcagatgagtgaattatttatgtatttgagtctctcaattgtcctttgtgcaactacattatattactcagtataccagtcctttgactgaaataagagtatatattttcttttc

SEQ ID NO: 2714 - protein, 667 aa, Gossypium hirsutum
  misc_feature (9)..(251): Pfam Name: Epimerase Pfam Description: NAD dependent epimerase/dehydratase f
  misc_feature (383)..(661): Pfam Name: RmlD_sub_bind Pfam Description: RmlD substrate binding domain
  misc_feature: Ceres Clone ID no. 1920439
  misc_feature: Bit score of 1894.5 for HMM based on sequences of Figure 28
  misc_feature: Functional Homolog Of SEQ ID NO. 2708
  misc_feature: in Figure 28
MSSYTPKNILITGAAGFIASHVANRLIRNYPDYKIVVLDKLDYCSNLKNLLPSKSSPNFKFVKGDIGSADLVNYLLITESIDTIMHFAAQTHVDNSFGNSFEFTKNNIYGTHVLLEACKVTGQIRRFIHVSTDEVYGETDEDAVVGNHEASQLLPTNPYSATKAGAEMLVMAYGRSYGLPVITTRGNNVYGPNQFPEKLIPKFILLAMRGKTLPIHGDGSNVRSYLYCEDVAEAFEVILHKGEVGHVYNIGTKKERRVIDVAKDICKLFSMDPETSIKFVENRPFNDQRYFLDDEKLKNLGWSEQTVWEEGLKKTIEWYTQNPEWWGDVSGALLPHPRMLMMPGGRHFDSEEGKGTSFASGPNQTRMVVPTFKTSSSTQKPALKFLIYGRTGWIGGLLGQLCEKQGIPFEYGRGRLEDRSSLMADIQNIKPTHVFNAAGVTGRPNVDWCESHKTETIRTNVAGTLTLADVCREHGLLMMNFATGCIFEYDAGHPEGSGIGYKEEDKPNFTGSFYSKTKAMVEELLKEYDNVCTLRVRMPISSDLNNPRNFITKIARYNKVVNIPNSMTILDELLPISIEMAKRNLNGIWNFTNPGVVSHNEILEMYKAYIDPKFQWVNFTLEEQAKVIVAPRSNNEMDASKLKNEFPDLLPIKESLIKYVFEPNKRT

SEQ ID NO: 2715 - DNA, 2013 bp, Populus balsamifera subsp. trichocarpa
  misc_feature: Ceres Annot ID no. 1482328
  misc_feature: Encodes the peptide sequence at SEQ ID NO. 2716
atggctacatatactccgaagaacatcctaatcaccggggctgctggttttattgcatcccatgtttgcaataggcttatccgcaactaccctgattacaaaattgttgtgcttgacaagcttgactattgctcgaacttgaaaaacctcctcccttctaagtcatctcctaactttaagtttgtcaagggtgacattggaagtgctgatctcgtcaacttccttctgatcactgagtcgatcgacacaattatgcactttgcagcccagacccatgttgacaactcttttggtaacagttttgagtttaccaagaacaatatttatggaactcatgtccttttagaagcttgcaaagtcactggtcagatcaggaggttcatccatgtgagcacggatgaagtatatggggagaccgatgaagatgctgttgtaggaaatcatgaggcctctcaacttctcccaaccaacccctactctgcaacaaaagctggagcagaaatgcttgttatggcatatggccggtcatatgggctgcctgtgataaccactcgtgggaacaatgtttatggccccaatcagttccctgaaaaattaatcccgaagtttatcctcttagccatgcaagggaaggatctccccatccatggggatggttctaatgtgaggagttacttgtattgtgaggatgttgctgaggcttttgaagtcatccttcacaagggagaggtgggccatgtttacaatgttgggacaaagaaggaaaggagagtgattgatgtagccaaagatatttgcaatcttttctccatggaccctgataaaagcatcaagtttgtagagaatagaccgtttaatgaccaaaggtactttttggatgatcagaagctgaagattttgggttggtcggagcacactacatgggaggaggggttgagaaagactatcgagtggtacactcaaaatcctgattggtggggtgatgtcactggagccctgcttcctcatccaagaatgcttatgatgcctggtgggagacactttgacgggtctgaagagaacagagatgcatcttatgtctcaaataattcaaatcaggcccgaatggtgattccagttacaaaagtaggcactggctctcctcgaaaaccttctcttaagttcctaatctatggcaggactggatggattgggggtctgctggggaagttgtgtgagaaacaaggaatttcctttgaatatggaaaggggcgcttggaagatcgatcttcacttttgtcagatattcagaacatcaggcctacccatgtttttaatgctgccggggtcaccggcagacctaatgttgattggtgtgaatctcacaagacagaaaccatacgcaccaatgttgctggaactctaactttagcagatgtttgcagagagcacaacctcctgatggtaaattttgctacaggctgcatatttgagtatgatgctggtcatccagagggttctggcattggtttcactgaggaagacaagcccaatttcattggttctttctattcaaaaactaaggccatggtcgaagagcttttgagagaatatgacaatgtgtgcacgctcagagttagaatgccaatatcatcagacctaagcaacccgcgcaacttcattacaaaaatctctcgctacaataaagtagttaacattccaaacagcatgactatcttggaggaacttctacctatttcaattgagatggcaaaaaggaacttgaggggtatatggaacttcacgaaccctggtgttgtgagccataatgagattctggacatgtacaagaactacattgacccgaacttcacatgggttaacttcaacctagaggagcaagccaaggtgatagttgccccccggagcaacaatgagttggatgcgtccaagctgaagaatgaattccctgagttgctgccaatcaaggagtccctaatcaagtatgtttttgaacccaacaagagaacctaa

SEQ ID NO: 2716 - protein, 670 aa, Populus balsamifera subsp. trichocarpa
  misc_feature (9)..(251): Pfam Name: Epimerase Pfam Description: NAD dependent epimerase/dehydratase f
  misc_feature (388)..(531): Pfam Name: RmlD_sub_bind Pfam Description: RmlD substrate binding domain
  misc_feature: Ceres Annot ID no. 1482328
  misc_feature: Bit score of 1887.9 for HMM based on sequences of Figure 28
  misc_feature: Functional Homolog Of SEQ ID NO. 2708
  misc_feature: in Figure 28
MATYTPKNILITGAAGFIASHVCNRLIRNYPDYKIVVLDKLDYCSNLKNLLPSKSSPNFKFVKGDIGSADLVNFLLITESIDTIMHFAAQTHVDNSFGNSFEFTKNNIYGTHVLLEACKVTGQIRRFIHVSTDEVYGETDEDAVVGNHEASQLLPTNPYSATKAGAEMLVMAYGRSYGLPVITTRGNNVYGPNQFPEKLIPKFILLAMQGKDLPIHGDGSNVRSYLYCEDVAEAFEVILHKGEVGHVYNVGTKKERRVIDVAKDICNLFSMDPDKSIKFVENRPFNDQRYFLDDQKLKILGWSEHTTWEEGLRKTIEWYTQNPDWWGDVTGALLPHPRMLMMPGGRHFDGSEENRDASYVSNNSNQARMVIPVTKVGTGSPRKPSLKFLIYGRTGWIGGLLGKLCEKQGISFEYGKGRLEDRSSLLSDIQNIRPTHVFNAAGVTGRPNVDWCESHKTETIRTNVAGTLTLADVCREHNLLMVNFATGCIFEYDAGHPEGSGIGFTEEDKPNFIGSFYSKTKAMVEELLREYDNVCTLRVRMPISSDLSNPRNFITKISRYNKVVNIPNSMTILEELLPISIEMAKRNLRGIWNFTNPGVVSHNEILDMYKNYIDPNFTWVNFNLEEQAKVIVAPRSNNELDASKLKNEFPELLPIKESLIKYVFEPNKRT

SEQ ID NO: 2717 - protein, 675 aa, Oryza sativa subsp. japonica
  misc_feature (9)..(251): Pfam Name: Epimerase Pfam Description: NAD dependent epimerase/dehydratase f
  misc_feature (388)..(666): Pfam Name: RmlD_sub_bind Pfam Description: RmlD substrate binding domain
  misc_feature: Public GI ID no. 115452247
  misc_feature: Bit score of 1875.9 for HMM based on sequences of Figure 28
  misc_feature: Functional Homolog Of SEQ ID NO. 2708
  misc_feature: in Figure 28
MAAYEPKNILITGAAGFIASHVANRLVRNYPHYKIVVLDKLDYCSSLSNLNPSRPSPNFKFVKGDIASADLVNYLLTTESIDTIMHFAAQTHVDNSFGNSFEFTKNNIYGTHVLLEACKVTGQIRRFIHVSTDEVYGETDEDAVVGNHEASQLLPTNPYSATKAGAEMLVMAYGRSYGLPVITTRGNNVYGPNQFPEKLIPKFILLAMRGLPLPIHGDGSNVRSYLYCEDVAEAFEVVLHKGEVGHVYNIGTVKERRVIDVAKDICKLFGLDTEKVIRFVENRPFNDQRYFLDDQKLKKLGWAERTLWEEGLKKTIEWYTNNPDYWGDVAGALLPHPRMLMTPGVERHNWTDEIKSLSTSPDEAKESSTAVPAATAKSTSSAPQKASYKFLIYGRTGWIGGLLGKICEKQGIPYEYGKGRLEERSQLLQDIRNVKPTHVFNAAGVTGRPNVDWCETHKQDTIRTNVVGTLNLADVCREQGLLMINYATGCIFEYDAKHPEGSGIGFKEEDKPNFTGSYYSKTKAMVEELLQEYDNVCTLRVRMPISSDLSNPRNFITKIARYDKVVNIPNSMTILDELLPISIEMAKRDCRGIWNFTNPGVVSHNEILEMYKKYLNPDFKWTNFTLEEQAKVIVAPRSNNEMDASKLKSEFPELLSIKDSLVKYVFEPNRKVPAN

SEQ ID NO: 2718 - DNA, 2347 bp, Arabidopsis thaliana
  misc_feature: Ceres Annot ID no. 869962
  misc_feature: Encodes the peptide sequence at SEQ ID NO. 2719
gacgaacgagaagactcttttttgaattttgattcttcttcttctccgtttctttcgctacttcctcagcttcgtcaccgtcgaaaattcttcacgttttcctcggaattttccaattgtcttctccaattctcttgcgatcgttgaagatctgaaaaattcgaagcgtttgatcatggcttcgtacactcccaagaacattctcatcaccggagctgctggtttcattgcgtctcatgtcgccaacagactcatacgaagctatcctgattacaaaatcgttgtgcttgacaagcttgattactgttcaaatctcaagaatctcaatccttctaagcactctccgaacttcaagtttgtcaaaggtgatatcgctagtgctgacttggtgaatcatcttctcatcactgaaggtattgacaccatcatgcatttcgctgctcagactcacgtcgacaattccttcggtaacagtttcgagtttactaagaataatatctatggaactcatgtccttcttgaggcttgtaaagttactggtcagattaggaggtttattcatgttagtactgatgaagtttatggtgaaactgatgaggatgctcttgttggtaaccatgaggcttctcagctgcttccgacgaatccttactctgccacgaaagctggtgctgagatgcttgttatggcttatggtagatcttatggtttgcctgttattaccactcgtgggaataacgtctatggaccgaatcagtttcctgagaagttgattcctaagttcattttgctggcaatgagagggcaggttcttcccattcatggagatggatcaaatgtcaggagctacctctactgtgaagacgttgctgaggcttttgaagttgttcttcacaagggagaagttggccatgtttacaatattgggacgaagaaggagaggagagtgaatgatgttgccaaagacatctgcaaactcttcaacatggaccctgaggcgaacatcaagtttgtcgacaacagaccttttaacgatcagaggtacttccttgacgatcagaagctcaaaaagttgggatggtcagagagaaccacgtgggaagaagggttgaagaaaactatggattggtacacacagaacccggagtggtggggtgatgtttctggagcattgcttcctcatccaaggatgctgatgatgcctggtgggcgacactttgatggctccgaggacaattcgctggcagctactttatctgaaaaaccaagtcaaacccatatggttgttccaagccaaaggagcaacggcacacctcaaaagccttcgctgaagttcctgatatatggaaagaccggatggatcggtggtctgcttggaaagatatgtgataagcaaggaattgcttacgagtatgggaaaggtcggttggaggatcgatcttctcttctgcaggatattcagagtgttaagccaacccatgttttcaattccgctggtgtgactgggagacccaatgttgactggtgtgagtctcacaagaccgagactatccgtgccaatgtagctggcacattgactctagctgatgtctgcagagagcacggactcctaatgatgaatttcgctactggttgtatattcgaatatgacgacaagcatccggaaggttcaggaattggcttcaaggaggaagacacacccaacttcactggctctttctactcgaaaaccaaagccatggtcgaggagctgctaaaggagtatgacaacgtatgcacattgagggtaaggatgccgatctcctcggatctaaacaacccgcgcaacttcatcaccaagatctccaggtacaacaaagtagtgaacatcccaaacagcatgactgtgttggacgagttattaccaatctccatcgagatggcgaaaagaaacttgaaaggaatctggaacttcacaaacccaggtgtggtgagccacaacgagatcctagagatgtacagagactacatcaaccctgaattcaaatgggcaaacttcacattagaggagcaagctaaagtcattgtggctccaagaagcaacaacgagatggatgcttccaagctcaagaaagagttccctgagctactctctatcaaggagtctctgattaagtatgcatacgggccaaacaagaaaacctgaagagaatgattgtgattcgtcattagataatcacctttaatatcagtttcgtgtattttgttttgttattgtttaattaccccttctttcattagatttgcttaaggggtgtatttgtagttcgaatattatatgtaataagagcttgttctcatttgtgtc

SEQ ID NO: 2719 - protein, 669 aa, Arabidopsis thaliana
  misc_feature (9)..(251): Pfam Name: Epimerase Pfam Description: NAD dependent epimerase/dehydratase f
  misc_feature (385)..(663): Pfam Name: RmlD_sub_bind Pfam Description: RmlD substrate binding domain
  misc_feature: Ceres Annot ID no. 869962
  misc_feature: Bit score of 1894.2 for HMM based on sequences of Figure 28
  misc_feature: Functional Homolog Of SEQ ID NO. 2708
  misc_feature: in Figure 28
MASYTPKNILITGAAGFIASHVANRLIRSYPDYKIVVLDKLDYCSNLKNLNPSKHSPNFKFVKGDIASADLVNHLLITEGIDTIMHFAAQTHVDNSFGNSFEFTKNNIYGTHVLLEACKVTGQIRRFIHVSTDEVYGETDEDALVGNHEASQLLPTNPYSATKAGAEMLVMAYGRSYGLPVITTRGNNVYGPNQFPEKLIPKFILLAMRGQVLPIHGDGSNVRSYLYCEDVAEAFEVVLHKGEVGHVYNIGTKKERRVNDVAKDICKLFNMDPEANIKFVDNRPFNDQRYFLDDQKLKKLGWSERTTWEEGLKKTMDWYTQNPEWWGDVSGALLPHPRMLMMPGGRHFDGSEDNSLAATLSEKPSQTHMVVPSQRSNGTPQKPSLKFLIYGKTGWIGGLLGKICDKQGIAYEYGKGRLEDRSSLLQDIQSVKPTHVFNSAGVTGRPNVDWCESHKTETIRANVAGTLTLADVCREHGLLMMNFATGCIFEYDDKHPEGSGIGFKEEDTPNFTGSFYSKTKAMVEELLKEYDNVCTLRVRMPISSDLNNPRNFITKISRYNKVVNIPNSMTVLDELLPISIEMAKRNLKGIWNFTNPGVVSHNEILEMYRDYINPEFKWANFTLEEQAKVIVAPRSNNEMDASKLKKEFPELLSIKESLIKYAYGPNKKT

SEQ ID NO: 2720 - DNA, 2025 bp, Solanum lycopersicum
  misc_feature: Ceres Annot ID no. 8461116
  misc_feature: Encodes the peptide sequence at SEQ ID NO. 2721
atgtctaactatacaccaaagaatatactcattactggggccgcagggtttattgcatctcatgttgccaaccgccttgttcggagttaccctgattacaatattgtggttcttgacaagcttgattattgctcaaacctgaaaaatctttccccatctcgatcttcccctaattttaagtttgttaagggagatattggcagtgctgatcttgttaactaccttctcatcaccgagaacattgacactataatgcactttgctgctcagacccatgtcgacaactcctttggtaatagctttgagttcaccaagaacaacatttatggcacacacgtgctattagaggcatgcaaagttactggtcagatcagaaggtttatacatgttagcactgatgaggtttacggagagactgatgaagatgctgttgtaggaaatcatgaagcatcgcaacttctccccacaaacccatattcagccacgaaagctggagctgaaatgcttgttatggcatatgcaagatcatatggattgcctgttatcaccactagagggaacaatgtgtatggtcccaatcaatttcctgagaagctaatcccaaagttcatacttttagctttgaatgggaagcctcttccgattcacggagatggttcaaatgttagaagttatctctattgtgaggacgttgctgaggctttcgaagttgttcttcaccgaggtgatgttggtcatgtttataacatcgggactaagaaagagaggcgagtgattgatgttgccaaagatatatccaatctttttaacaaggatccagacacaagcattcagtttgtggaaaacaggcccttcaatgaccagaggtatttcctagatgatcagaagttgaagaacctgggttggtccgagaagaccacctgggaagagggtctgaaaaaaaccatggagtggtatgtcaataatcctgattggtggggagatgtctctggggcattgcttccccatcctagaatgctgatgatgcctggtggggtagagagaaattcggatggagctgaaaaagatgattctggatcatctgagatctcaggaaacatgaaacttaacggaatggtagttccagcttccaagatcagcaactcccctagtagatcaccttataagtttttgatttatggtagaactgggtggattggtggtctcctaagcaaactgtgtgagaaacagggaattccttatgagtatggaaagggacgtctggaggatcgctcacaacttttgtcagacattcatgctgtgaagcccacacatgtattcaatgctgctggtgtcactggtaggcccaatgttgattggtgtgagagtcataagactgaaacaatccgtacaaatgttgctggaactctaaacttggcagatgtttgtaaagagaatggtttactgatgatgaattttgcaaccggttgcatattcgaatatgatgctgcacaccccgaaggttctggcattggattcaaagaggaagacacgcccaatttcaccggttctttctattcaaagaccaaggccatggttgaagagttgttgaaagagtaccccaatgtttgcacccttagagtcaggatgccaatttcttcagacctcaacaacccccgtaacttcatcaccaagattagccgctacaataaagtggtcaacattcccaacagcatgacgattttggatgagcttcttccaatttcaatcgagatggcaaagcgtaatctcacaggcatatggaatttcacaaaccctggtgttgtgagccataacgagatcttggagatgtacaagaaatacataaacccagaatttaaatggtccaacttcacactggaagagcaggctaaggtaattgttgcacctcgcagtaacaatgaaatggacgcgtccaagttgaaaaaggagttccctgagttgttgtctatcaaagaatcattgatcaaaaatgtgtttgaaccaaatagaaaaacttctgcatga

SEQ ID NO: 2721 - protein, 674 aa, Solanum lycopersicum
  misc_feature (9)..(251): Pfam Name: Epimerase Pfam Description: NAD dependent epimerase/dehydratase f
  misc_feature (390)..(533): Pfam Name: RmlD_sub_bind Pfam Description: RmlD substrate binding domain
  misc_feature: Ceres Annot ID no. 8461116
  misc_feature: Bit score of 1885.8 for HMM based on sequences of Figure 28
  misc_feature: Functional Homolog Of SEQ ID NO. 2708
  misc_feature: in Figure 28
MSNYTPKNILITGAAGFIASHVANRLVRSYPDYNIVVLDKLDYCSNLKNLSPSRSSPNFKFVKGDIGSADLVNYLLITENIDTIMHFAAQTHVDNSFGNSFEFTKNNIYGTHVLLEACKVTGQIRRFIHVSTDEVYGETDEDAVVGNHEASQLLPTNPYSATKAGAEMLVMAYARSYGLPVITTRGNNVYGPNQFPEKLIPKFILLALNGKPLPIHGDGSNVRSYLYCEDVAEAFEVVLHRGDVGHVYNIGTKKERRVIDVAKDISNLFNKDPDTSIQFVENRPFNDQRYFLDDQKLKNLGWSEKTTWEEGLKKTMEWYVNNPDWWGDVSGALLPHPRMLMMPGGVERNSDGAEKDDSGSSEISGNMKLNGMVVPASKISNSPSRSPYKFLIYGRTGWIGGLLSKLCEKQGIPYEYGKGRLEDRSQLLSDIHAVKPTHVFNAAGVTGRPNVDWCESHKTETIRTNVAGTLNLADVCKENGLLMMNFATGCIFEYDAAHPEGSGIGFKEEDTPNFTGSFYSKTKAMVEELLKEYPNVCTLRVRMPISSDLNNPRNFITKISRYNKVVNIPNSMTILDELLPISIEMAKRNLTGIWNFTNPGVVSHNEILEMYKKYINPEFKWSNFTLEEQAKVIVAPRSNNEMDASKLKKEFPELLSIKESLIKNVFEPNRKTSA

SEQ ID NO: 2722 - protein, 669 aa, Physcomitrella patens subsp. patens
  misc_feature (11)..(253): Pfam Name: Epimerase Pfam Description: NAD dependent epimerase/dehydratase f
  misc_feature (382)..(660): Pfam Name: RmlD_sub_bind Pfam Description: RmlD substrate binding domain
  misc_feature: Public GI ID no. 168046471
  misc_feature: Bit score of 1812.3 for HMM based on sequences of Figure 28
  misc_feature: Functional Homolog Of SEQ ID NO. 2708
  misc_feature: in Figure 28
MTGTMYEPKNILITGAAGFIASHVANRLIRNYPQYKIVVLDKLDYCSNLKNLFPSRASKNFKFVKGDIGSADLVNYLLITEGIDTIMHFAAQTHVDNSFGNSFEFTKNNIYGTHVLLEACKVTGQIKRFIHVSTDEVYGETEAEAIVGNHEASQLLPTNPYSATKAGAEMLVMAYAKSYGLPCITTRGNNVYGPNQFPEKLIPKFILLAMQGKPLPIHGDGTNVRSYLYCEDVAEAFECVLHKGELGHVYNIGTQRERRVMDVAKDICELFNLDYKKSIKMVDNRPFNDQRYFLDDKKLIALGWQERTSWAEGLQKTKDWYTSNPDWWGDVSGALVPHPRSVTMPGKDNGPALLNGTGHGLLGGIVSKVLSPVKNVKGDPSLKFLIYGRTGWLGGLLGKMCKERGIAYEYGAGRLENRTSLEADIAAVKPTHVFNAAGVTGRPNVDWCESHKPETIRANVVGTLTLADVCKQNGLLLMNYATGCIFEYDDKHPLGSGIGFKEEDKPNFAGSYYSKTKAMVEDLLSEFDNVCTLRVRMPISSDLENPRNFISKIVRYQKIVNIPNSMTILDELLPISIEMAKRNLTGIWNFTNPGVVSHNEIMEMYKEYIDPSLTWVNFTLEEQAKVIVAARSNNEMDASKLSKEFPEMLGIKESLKKFVFEPNRKTPVM

SEQ ID NO: 2723 - DNA, 2485 bp, Panicum virgatum
  misc_feature: Ceres Clone ID no. 1792946
  misc_feature: Encodes the peptide sequence at SEQ ID NO. 2724
atgtgcgtcttctccgccgcagcgcagaccgaccaccgacccctcctcctcctccccctcctgcgcgccccaccaccaccgcctgcatttattagcctccccctcctctcctccccggctctcgcgccctccctctcgctctctcatcaaccgacgccatccgctcccgcgccggccgcgccgcgcgtcgcatacggtagcaggatttcagaaataatcatacaggggatatggcgacgaattacaaacctaagaacatccttattacaggagctgctggctttatcgcctcccatgttgcgattcgcattaccaagaagtaccccgattacaagatcgtcgtccttgacaagcttgactactgctctaatctgaagaacctgcttcctgtgagctcgtccccaaacttcaagtttgtcaagggagatattgcaagtgctgatcttgtcaacttccttcttgtcacggagaacattgataccataatgcacttcgcagcccagacacacgttgacaattcatttgggaattcctttgaatttaccaagaacaacatttatggtacccatgttcttcttgaggcctgcaagatcactggccagatcaagagattcatccatgtcagcactgatgaggtctatggggagactgatgaggatgcacttgttggaaacaaggaggcatcacagctgctccctacaaatccatatgcagccaccaaagctggagcagagatgcttgtaatggcatatgggagatcctatggcctgccggttatcactactcggggaaataatgtctatggccctaatcagtttcctgagaagcttatcccaaagttcattctcttggccatgagaggggagcccctccctatccatggtgatggaaccaatgtccgtagctacctctattgtgaggatgtcgcggaagcatttgaggtaattcttcatcatggagaagttggacatgtttataatattggaacaaagagagagaggacggtcattgatgtagcaaaagatgtttgcaagcttttcaatttggaagctgacaaagtcattatgtttgtcgagaacagacctttcaacgatcagaggtatttcttggatgatgagaagctcaagagccttggatgggctgagcgcaccccatgggaggaaggcttgaagaggacaatggaatggtatgttgcaaattccgattattggggtgatgtttctggtgcactgctgcctcatccaaggacgttaatgatgcctgggtgtgagggctctgaggagattaaagtaatactcagtcagtttaataacattaagacaaaggtggattcaacatcagatagtgcttcagaaacgcatgccttcaagttcttgatatatggtaggacaggatggatcggtggacttcttggaaaaatatgtgagaagcaaggaattccatatgaatatggaaaaggtcgcttgcaagatcgttcttctctcatcctggatattcaaactattaagccaacacatgtcttcaatgctgctggtgttactggcaggcccaatgttgactggtgtgaatcgcacaagccggacactatccgcaccaatgttgtgggcactttgactctagctgatgtgtgtagggagcatggcttattgatgatgaattatgccactgggtgcatatttgaatatgatgcacatcatccagaagggtcaggtatcggcttcaaagaggaggatgcaccaaattttactggttcgttctactcgaagactaaggcaatggttgaggagctattgaaggagtatgagaacgtctgcaccctacgagtccggatgccaatatcttcagacctcagcaacccccgaaactttgtgacaaagatcagccgttacaacaaggtggtgaacatccctaacagcatgacaatattggacgaactcctgcctatctcagtggagatggcgaaaaggaatctgcggggcatctataatttcaccaaccctggcgtcgtcagccacaacgagatcctggagatgtacaagcagtacatcgaccccagcttcaagtggacaaacttcactctcgaggagcaggccaaggtcatcatcgcaccccggagcaacaacgagatggacgcgagcaagctaaagaaagagttccctgagctgctgtcgatcaaagactctttgatcaagtatgtcttcgagcccaataggaaggtgcctgtaaactgaagagccagcacagccgatactatagaaaatacagcaactcattataagcaagcatgtagaagccatttgtcgcaaacaattcgttagaatgtttattcatcatacttagcagcatatctccactataggttgattcacagctgaatagacaatacatatatctggcaatctgttgatggcagtatgatgattgctcaatttgttgtagaggcttatcgcctattttacggagttcaaatgttcagtctgggtgt

SEQ ID NO: 2724 - protein, 666 aa, Panicum virgatum
  misc_feature (10)..(252): Pfam Name: Epimerase Pfam Description: NAD dependent epimerase/dehydratase f
  misc_feature (381)..(524): Pfam Name: RmlD_sub_bind Pfam Description: RmlD substrate binding domain
  misc_feature: Ceres Clone ID no. 1792946
  misc_feature: Bit score of 1860.3 for HMM based on sequences of Figure 28
  misc_feature: Functional Homolog Of SEQ ID NO. 2708
MATNYKPKNILITGAAGFIASHVAIRITKKYPDYKIVVLDKLDYCSNLKNLLPVSSSPNFKFVKGDIASADLVNFLLVTENIDTIMHFAAQTHVDNSFGNSFEFTKNNIYGTHVLLEACKITGQIKRFIHVSTDEVYGETDEDALVGNKEASQLLPTNPYAATKAGAEMLVMAYGRSYGLPVITTRGNNVYGPNQFPEKLIPKFILLAMRGEPLPIHGDGTNVRSYLYCEDVAEAFEVILHHGEVGHVYNIGTKRERTVIDVAKDVCKLFNLEADKVIMFVENRPFNDQRYFLDDEKLKSLGWAERTPWEEGLKRTMEWYVANSDYWGDVSGALLPHPRTLMMPGCEGSEEIKVILSQFNNIKTKVDSTSDSASETHAFKFLIYGRTGWIGGLLGKICEKQGIPYEYGKGRLQDRSSLILDIQTIKPTHVFNAAGVTGRPNVDWCESHKPDTIRTNVVGTLTLADVCREHGLLMMNYATGCIFEYDAHHPEGSGIGFKEEDAPNFTGSFYSKTKAMVEELLKEYENVCTLRVRMPISSDLSNPRNFVTKISRYNKVVNIPNSMTILDELLPISVEMAKRNLRGIYNFTNPGVVSHNEILEMYKQYIDPSFKWTNFTLEEQAKVIIAPRSNNEMDASKLKKEFPELLSIKDSLIKYVFEPNRKVPVN

SEQ ID NO: 2725 - DNA, 2341 bp, Zea mays
  misc_feature: Ceres Clone ID no. 351260
  misc_feature: Encodes the peptide sequence at SEQ ID NO. 2726
gcactctcctccccgctctcgacttcccatcccctgcggccccgccccccgactcttctcgtcgcggcgcgcccaatcggctcggtggcaggcttgcgcaccggctcggctcgggtccggttctaccgccaacgcgggccgccgcgctcccggatctcggtctagtcagagagttagcagacaaagatggcgacttatgagcccaagaacattctcataactggtgctgctggtttcattgcatcgcatgtcgccaaccgtctggtcaggaactatccccaatacaagatcgttgtccttgacaagattgactactgctccaacctaaagaacctcaatccttcacggtcttcaccaaatttcaaatttgtcaagggtgatattgcaagtgctgacctggtgaattaccttctgatcaccgagtcaattgacaccatcatgcactttgctgcccagacgcatgttgataattcttttggcaattcatttgagttcacaaaaaacaatatatatggcacccatgttcttcttgaggcttgcaaggttactggtcagatcaggaggtttattcatgtcagtaccgacgaggtgtatggtgaaactgatgaagatgctgtggttggtaaccatgaggcctcacagctgcttccaacaaatccatattcagctacaaaggctggggctgaaatgcttgtgatggcatacggaaggtcttatggtcttcctgtgattaccactcgtggcaacaatgtgtatgggccaaatcaatttcctgagaaactcattcccaaattcattcttttggccatgcaaggtctgcctcttccaattcatggagatggctccaacgtcaggagctacctgtactgtgaggatgtggccgaagcttttgaggtggtccttcacaaaggagaagttggacatgtgtataatattggtactgtgaaggagaggagggtgattgatgtagccaaggacatatgcaagctctttggcttggatactgagaaagtcatcaggtttgttgagaacaggcccttcaatgaccagaggtacttcttagatgatcagaagctaaagagattgggatgggcagagcgcacaccatgggaagagggcttgaagaagacgatggagtggtacaccaccaatcctgattactggggagatgtcactggtgcgctgcttcctcatccaaggatgttgatgactcctggagttgaaaggcataactgggctgaagaaatcaagtctctggcttcttcgccagctgaagctagtacaatagctccagcaaccagtaccaaaagcatctctgatgcccctcagaagccttcctacaggtttttaatctatggtaggactggatggattggtggcctccttggaaagatttgtgaaaagcaagggataccatatgagtatgggaaaggacgcttggaagagcgctctcagctgttggaggatattaggaatgtgaagccgactcatgttttcaatgctgccggagtcactgggagaccaaatgttgactggtgcgagacccataaacaggacactatccgcaccaatgttgtaggcactttgaatcttgctgatgtctgtcgcaagcagggtctgctcatgattaattatgctacaggctgtatatttgagtatgatgctaagcaccctgaagggtctggtattggctttaaagaggaagacacgcccaactttattggttccttttattccaaaactaaagcaatggtggaagagctattgaaggagtatgataatgtctgtactcttagggtcaggatgcctatatcatcagatctaagcaaccctcgtaacttcatcacaaagatagctcgttacgacaaggtggtgaacattcccaacagcatgacaatcttggatgagcttctgcctatctccattgagatggcgaaacgggactgcaggggcatatggaacttcaccaaccctggcgctgtaagccacaacgagattctagagatgtacaagaaatacatcaatcctgatttcaagtggaccaatttcacactcgaagaacaggccaaggtgatagtcgcgcctagaagcaacaacgagatggacacgtcgaaactgaaggccgagttccctcagctgctgtccatcaaggattctttgatcaagtacgtctttgagcccaacaggaaggttcctgttaattgaggatttacgttgcgtggatgcggaggttatttgtgttggttattggactctaaattagctaatgttgcaccgtggtgcgtactagttgtgttcgattcttttgggacaatagcaagcatacctctttctggtcgtc

SEQ ID NO: 2726 - protein, 672 aa, Zea mays
  misc_feature (9)..(251): Pfam Name: Epimerase Pfam Description: NAD dependent epimerase/dehydratase f
  misc_feature (385)..(663): Pfam Name: RmlD_sub_bind Pfam Description: RmlD substrate binding domain
  misc_feature: Ceres Clone ID no. 351260
  misc_feature: Bit score of 1863.4 for HMM based on sequences of Figure 28
  misc_feature: Functional Homolog Of SEQ ID NO. 2708
MATYEPKNILITGAAGFIASHVANRLVRNYPQYKIVVLDKIDYCSNLKNLNPSRSSPNFKFVKGDIASADLVNYLLITESIDTIMHFAAQTHVDNSFGNSFEFTKNNIYGTHVLLEACKVTGQIRRFIHVSTDEVYGETDEDAVVGNHEASQLLPTNPYSATKAGAEMLVMAYGRSYGLPVITTRGNNVYGPNQFPEKLIPKFILLAMQGLPLPIHGDGSNVRSYLYCEDVAEAFEVVLHKGEVGHVYNIGTVKERRVIDVAKDICKLFGLDTEKVIRFVENRPFNDQRYFLDDQKLKRLGWAERTPWEEGLKKTMEWYTTNPDYWGDVTGALLPHPRMLMTPGVERHNWAEEIKSLASSPAEASTIAPATSTKSISDAPQKPSYRFLIYGRTGWIGGLLGKICEKQGIPYEYGKGRLEERSQLLEDIRNVKPTHVFNAAGVTGRPNVDWCETHKQDTIRTNVVGTLNLADVCRKQGLLMINYATGCIFEYDAKHPEGSGIGFKEEDTPNFIGSFYSKTKAMVEELLKEYDNVCTLRVRMPISSDLSNPRNFITKIARYDKVVNIPNSMTILDELLPISIEMAKRDCRGIWNFTNPGAVSHNEILEMYKKYINPDFKWTNFTLEEQAKVIVAPRSNNEMDTSKLKAEFPQLLSIKDSLIKYVFEPNRKVPVN

SEQ ID NO: 2727 - DNA, 2019 bp, Sorghum bicolor
  misc_feature: Ceres Annot ID no. 8641839
  misc_feature: Encodes the peptide sequence at SEQ ID NO. 2728
atggcgacttacgagcccaagaacattctcatcaccggtgctgctggttttattgcatcgcatgtcgccaaccgcctggttaggaactacccgcactacaagattgttgtcctcgacaagcttgactactgctccagcctaaagaacctcaacccctcgcgggcttcaccaaatttgaagtttgtcaagggtgacattgcaagtgctgatctggtgaactaccttctggtcacagaatcgattgacaccatcatgcactttgctgctcagactcatgtggataattcatttggcaattcatttgagttcacaaaaaacaatatatatggtacacacgtccttcttgaggcttgcaaggttactggacagatcaggaggtttattcatgtcagtactgatgaggtctatggagaaactgatgaagatgctgtggttggtaaccatgaggcctcacagttgcttccaacaaatccatattcagctacaaaagctggggctgaaatgcttgtgatggcatatggcaggtcgtacggtcttcctgtgattaccactcgtggcaacaatgtgtatggaccaaatcagttccctgagaaactcatccccaaattcattcttttggccatgagaggtctgcctcttccaattcatggagacggttccaatgtcaggagctacctgtactgtgaggatgtggctgaagcttttgaggttgttcttcacaaaggggaggttggacatgtgtataatattggtacagtgaaggagaggagggtgattgatgtggccaaagacatttgcaggctctttggcttggatactgagaaagtaataaggtttgttgagaacagacccttcaatgaccagaggtacttcctggatgatcagaagctgaagagactgggatgggcagagcgcacaccatgggaagagggcttgaagaagacaattgagtggtacaccaccaatcctgattactggggagatgttactggtgctttgctccctcacccaaggatgttgatgactcctggagttgaaaggcataactggactgaggaaatcaaatctcttacttcttcaccagctgaagctagcacaacagctcctgcaaccagtaccaaaagaaccactgatgcccctcaaaagcctttgtacaagttcttaatttatggcaggactggatggattggtggcctccttgggaagatttgtgaaaagcaagggattctatatgagtatgggaaaggacgcttggaggagcgctctcagctgttggaggacattagaaatgtgaagccaactcatgtcttcaatgctgccggagtcactgggagaccaaatgttgactggtgcgagacccataaacaggacactgtccgcaccaatgttgtaggcacattgaatcttgctgacgtctgtcgtgagcagggtttgctcatggttaattatgctacaggctgtatatttgagtatgatgctaagcaccctgaagggtctggtattggctttaaagaggaagacacacccaactttacgggttccttttattctaaaacgaaagcaatggtggaagagctgttgaaggagtatgataatgtctgtactcttagggtcaggatgcctatatcatcagatctaagcaaccctcgtaacttcatcacaaagatagctcgctatgacaaggtggtgaacattcccaacagcatgacaattttggatgagcttctgcctatctccattgagatggcgaaacaggactgcagggggatatggaacttcaccaaccctggcgttgtcagccacaatgagattctagagatgtacaagaaatacatcaatcctgatttcaagtggaccaacttcacactcgaagagcaggccaaggtcatagtcgcacctagaagcaacaacgagatggacgcgtccaaactaaaggctgagttccctcagctgctgtccatcaaggattctttgatcaagtatgtctttgagcctaacaggaaggttccgtctatttga

SEQ ID NO: 2728 - protein, 672 aa, Sorghum bicolor
  misc_feature (9)..(251): Pfam Name: Epimerase Pfam Description: NAD dependent epimerase/dehydratase f
  misc_feature (415)..(530): Pfam Name: RmlD_sub_bind Pfam Description: RmlD substrate binding domain
  misc_feature: Ceres Annot ID no. 8641839
  misc_feature: Bit score of 1855.1 for HMM based on sequences of Figure 28
  misc_feature: Functional Homolog Of SEQ ID NO. 2708
MATYEPKNILITGAAGFIASHVANRLVRNYPHYKIVVLDKLDYCSSLKNLNPSRASPNLKFVKGDIASADLVNYLLVTESIDTIMHFAAQTHVDNSFGNSFEFTKNNIYGTHVLLEACKVTGQIRRFIHVSTDEVYGETDEDAVVGNHEASQLLPTNPYSATKAGAEMLVMAYGRSYGLPVITTRGNNVYGPNQFPEKLIPKFILLAMRGLPLPIHGDGSNVRSYLYCEDVAEAFEVVLHKGEVGHVYNIGTVKERRVIDVAKDICRLFGLDTEKVIRFVENRPFNDQRYFLDDQKLKRLGWAERTPWEEGLKKTIEWYTTNPDYWGDVTGALLPHPRMLMTPGVERHNWTEEIKSLTSSPAEASTTAPATSTKRTTDAPQKPLYKFLIYGRTGWIGGLLGKICEKQGILYEYGKGRLEERSQLLEDIRNVKPTHVFNAAGVTGRPNVDWCETHKQDTVRTNVVGTLNLADVCREQGLLMVNYATGCIFEYDAKHPEGSGIGFKEEDTPNFTGSFYSKTKAMVEELLKEYDNVCTLRVRMPISSDLSNPRNFITKIARYDKVVNIPNSMTILDELLPISIEMAKQDCRGIWNFTNPGVVSHNEILEMYKKYINPDFKWTNFTLEEQAKVIVAPRSNNEMDASKLKAEFPQLLSIKDSLIKYVFEPNRKVPSI

SEQ ID NO: 2729 - DNA, 2501 bp, Gossypium hirsutum
  misc_feature: Ceres Clone ID no. 1951869
  misc_feature: Encodes the peptide sequence at SEQ ID NO. 2730
gctctaagatttcgtcgtttatctttctccatctggattttgattgagctctctcttctttcgtcttgttgtggtgtttcttatttttgcagaattggtttcactatgtcttcttatacccctaagaacatcctcataactggggcagctggttttattgcgtcacatgtcgctaaccggctcataaggaactacccagactacaagattgttgtgcttgacaagcttgattactgctcgaacctgaaaaacctccttccttccaagtcatctccgaactttaagtttgtgaaaggtgacattggtagtgctgaccttgttaactacctccttattaccgagtctatcgacacaataatgcactttgcagcccagactcatgttgataactcgtttggaaacagctttgagtttaccaagaacaatatctatggcactcatgtcttgcttgaagcttgcaaagtcactggtcaaatcaggaggttcatccatgtcagcactgatgaggtttatggtgagacggatgaggatgctgttgtaggaaaccatgaggcttcccaacttctcccaacaaacccgtactctgctacaaaagctggtgctgaaatgcttgttatggcgtatggtaggtcatatgggctgcctgtgataacaacccgtggaaacaacgtttatggtcccaaccagttccctgaaaagttgattccaaagttcattctcctagcaatgaggggaaagactttaccaattcacggtgatggttctaatgtgaggagttatttatactgtgaggatgtggccgaggcatttgaagtcattcttcacaagggtgaagttggccatgtttataatattggaacaaagaaggagaggagagtgattgatgtggccaaagatatctgtaagcttttctcgatggatccagagaccagcatcaagtttgttgaaaacagaccattcaatgaccagaggtattttcttgatgatgagaagctgaagaacttgggatggtccgagcaaactgtatgggaagaggggctgaagaagaccattgaatggtacactcagaatcccgaatggtggggcgatgtgtctggtgcattgcttcctcaccctagaatgctgatgatgcctggtgggagacacttcgattctgaagagggaaaaggtacatcatttgcaagtggacctaatcagacccgaatggtggttccaaccttcaaaactagtagcagcacgcaaaaaccagccttgaagttcttgatctatggcaggactggctggattggaggtctgcttggtcagttatgtgagaaacaaggtattccctttgaatatggaagaggacgcttggaagatcgttcatcccttatggcagatattcagaatataaagccaacccatgtttttaatgctgctggtgtgactggtaggcccaatgttgattggtgtgaatctcacaaaacagaaacaattcgcaccaatgtggctggaaccttgaccttagcagatgtttgcagagaacatgggcttttgatgatgaattttgctacagggtgtatattcgagtacgatgcaggacatcctgagggctccggcattgggtataaagaggaagacaaacccaatttcactggttccttctattcaaaaaccaaggctatggttgaagagctgttgaaagaatatgacaacgtctgcactctcagagttcgaatgccgatctcatctgacctaaacaaccctcgtaactttattaccaagattgcacgctacaacaaggtggtcaacattcccaacagcatgacaatcttggatgaacttctgcctatttctatcgagatggctaaaaggaacttgaacggtatctgggactttacaaaccctggggttgtaagccacaatgagatcctggagatgtataaggcttacattgacccaaagtttcagtgggtgaacttcacattggaagaacaagccaaggttatagttgcccctcgaagcaataatgagatggacgcatccaagttgaagaacgagttccccgatctgctaccaatcaaggaatcactgattaagtatgtctttgaacccaacaagagaacctgagccttttgagcagcagtttacaggaatagaattcggtattatcctatgttttttcttcatttagttattgcctggaatatcttttcagtttaattcatttgttataatcttgtcttccacctcattagtttccactagataactcttaaggtgttactattagatttaaaccattcattgttagtagctgcaccaagcagtatcctagtctgtacgtccattcttgaagaaacaatctataggtgctttacaaattgtcatctgcaggctgacaggtgtattatttggcattacattagttgaatgttatgactttcaacagtcacctactggtctatgatggaggaaattccatctatctcttattactcagatgagtgaattatttatgt

SEQ ID NO: 2730 - protein, 667 aa, Gossypium hirsutum
  misc_feature (9)..(251): Pfam Name: Epimerase Pfam Description: NAD dependent epimerase/dehydratase f
  misc_feature (383)..(661): Pfam Name: RmlD_sub_bind Pfam Description: RmlD substrate binding domain
  misc_feature: Ceres Clone ID no. 1951869
  misc_feature: Bit score of 1891.3 for HMM based on sequences of Figure 28
  misc_feature: Functional Homolog Of SEQ ID NO. 2708
MSSYTPKNILITGAAGFIASHVANRLIRNYPDYKIVVLDKLDYCSNLKNLLPSKSSPNFKFVKGDIGSADLVNYLLITESIDTIMHFAAQTHVDNSFGNSFEFTKNNIYGTHVLLEACKVTGQIRRFIHVSTDEVYGETDEDAVVGNHEASQLLPTNPYSATKAGAEMLVMAYGRSYGLPVITTRGNNVYGPNQFPEKLIPKFILLAMRGKTLPIHGDGSNVRSYLYCEDVAEAFEVILHKGEVGHVYNIGTKKERRVIDVAKDICKLFSMDPETSIKFVENRPFNDQRYFLDDEKLKNLGWSEQTVWEEGLKKTIEWYTQNPEWWGDVSGALLPHPRMLMMPGGRHFDSEEGKGTSFASGPNQTRMVVPTFKTSSSTQKPALKFLIYGRTGWIGGLLGQLCEKQGIPFEYGRGRLEDRSSLMADIQNIKPTHVFNAAGVTGRPNVDWCESHKTETIRTNVAGTLTLADVCREHGLLMMNFATGCIFEYDAGHPEGSGIGYKEEDKPNFTGSFYSKTKAMVEELLKEYDNVCTLRVRMPISSDLNNPRNFITKIARYNKVVNIPNSMTILDELLPISIEMAKRNLNGIWDFTNPGVVSHNEILEMYKAYIDPKFQWVNFTLEEQAKVIVAPRSNNEMDASKLKNEFPDLLPIKESLIKYVFEPNKRT

SEQ ID NO: 2731 - DNA, 2019 bp, Sorghum bicolor
  misc_feature: Ceres Annot ID no. 8641817
  misc_feature: Encodes the peptide sequence at SEQ ID NO. 2732
atggcgacttacgagcccaagaacattcttatcaccggtgctgctggttttattgcatcgcatgtcgccaaccgcctggttaggaactatccgcactacaagattgttgtcctcgacaagcttgactactgctccagcctaaagaacctcaacccctcgcgggcctcacaaaatttgaagtttgtcaagggtgacattgcaagtgctgatctggtgaaccaccttctggtcacagagtcgattgacaccatcatgcactttgctgctcagactcatgtagataattcatttggcaattcatttgagttcacgaaaaacaatatatatggtacacacgtccttcttgaggcttgcaaggttactggtcagatcaggaggtttattcatgtcagtactgacgaggtctatggagaaactgatgaagatgctgtggttggtaatcatgaggcctcacagttgcttccaacaaatccgtattcagctacaaaagctggagctgaaatgcttgtgatggcatacggaaggtcttatggtcttcctgtgattaccactcggggcaacaatgtgtatgggccaaatcagttccctgagaaactcatccccaaattcattcttttggccatgagaggtctgcctcttccaattcatggagatggttccaatgtcaggagctacctgtactgtgaggatgtggctgaagcttttgaggtggttcttcacaaaggggaggttggacatgtgtataatattggtactgtgaaggagaggagggtgattgatgtggccaaagacatttgcaggctctttgacttggatactgagaaagtaatcaggtttgttgagaacagacccttcaatgaccagaggtacttcctggatgatcagaagctgaagagactgggatgggcagagcgcacaccatgggaagagggcttgaagaagacaattgagtggtacaccaccaatcctgattactggggagacgttactggtgctttgctccctcacccaaggatgttgatgactcctggagttgaaaggcataactggactgaggagatcaaatctcttacttcttcaccagctgaagctagcacaacagctcctgcaaccagtaccaaaagagccactgatgctcctcaaaagcctttgttcaagttcttaatctatggcaggactggatggattggtggcctccttgggaagatttgtgaaaagcaagggattccatatgagtatgggaaaggacgcttggaggagcgctctcagctgttggaggacattagaaatgtgaagccaactcatgtcttcaatgctgccggagtcactgggagaccaaatgttgactggtgcgagacccataaacaggacactatccgcaccaatgtcgtaggaacattgaatcttgctgacatctgtcgtgagcagggtttgctcatggttaattatgctacaggctgtatatttgagtatgatgctaagcaccctgaagggtctggtattggctttaaagaggaagacacacccaactttacgggttccttttattctaaaacgaaagcaatggtggaagagctgttgaaggagtatgataatgtctgtactcttagggtcaggatgcctatatcatcagatctaagcaaccctcgtaacttcatcacaaagatagctcgttatgacaaggtggtgaacattcccaacagcatgacaattttggatgagcttctgcctatctccattgagatggcaaaacgggactgcaggggcatatggaacttcaccaatcctggcgttgtcagccacaatgagattctagagatgtacaagaaatacatcaatcctgatttcaagtggaccaacttcacactcgaagagcaggccaaggtcatagtcgcacgtagaagcaacaacgagatggacgcgtcaaaactgaaggctgagttccctcagctgctgtccatcaaggattctttgatcaagtatgtctttgagcctaacaggaaggttccggctatttga

SEQ ID NO: 2732 - protein, 672 aa, Sorghum bicolor
  misc_feature (9)..(251): Pfam Name: Epimerase Pfam Description: NAD dependent epimerase/dehydratase f
  misc_feature (378)..(530): Pfam Name: RmlD_sub_bind Pfam Description: RmlD substrate binding domain
  misc_feature: Ceres Annot ID no. 8641817
  misc_feature: Bit score of 1854.1 for HMM based on sequences of Figure 28
  misc_feature: Functional Homolog Of SEQ ID NO. 2708
MATYEPKNILITGAAGFIASHVANRLVRNYPHYKIVVLDKLDYCSSLKNLNPSRASQNLKFVKGDIASADLVNHLLVTESIDTIMHFAAQTHVDNSFGNSFEFTKNNIYGTHVLLEACKVTGQIRRFIHVSTDEVYGETDEDAVVGNHEASQLLPTNPYSATKAGAEMLVMAYGRSYGLPVITTRGNNVYGPNQFPEKLIPKFILLAMRGLPLPIHGDGSNVRSYLYCEDVAEAFEVVLHKGEVGHVYNIGTVKERRVIDVAKDICRLFDLDTEKVIRFVENRPFNDQRYFLDDQKLKRLGWAERTPWEEGLKKTIEWYTTNPDYWGDVTGALLPHPRMLMTPGVERHNWTEEIKSLTSSPAEASTTAPATSTKRATDAPQKPLFKFLIYGRTGWIGGLLGKICEKQGIPYEYGKGRLEERSQLLEDIRNVKPTHVFNAAGVTGRPNVDWCETHKQDTIRTNVVGTLNLADICREQGLLMVNYATGCIFEYDAKHPEGSGIGFKEEDTPNFTGSFYSKTKAMVEELLKEYDNVCTLRVRMPISSDLSNPRNFITKIARYDKVVNIPNSMTILDELLPISIEMAKRDCRGIWNFTNPGVVSHNEILEMYKKYINPDFKWTNFTLEEQAKVIVARRSNNEMDASKLKAEFPQLLSIKDSLIKYVFEPNRKVPAI

SEQ ID NO: 2733 - DNA, 2429 bp, Gossypium hirsutum
  misc_feature: Ceres Clone ID no. 1920196
  misc_feature: Encodes the peptide sequence at SEQ ID NO. 2734
ctccacaattccctcaagctgctttccttctccaaattttcttcctcagcactctctctctagatttgtgtgtttctcattctgtatctagattttgattgattccccttcatcttaattgattttgcgatggctacttataccccgaagaacatcctcataactggggctgctgggtttattgcgtcgcatgttgccaatcggcttgtccgcaactacccagactacaagattgttgtacttgacaagcttgattactgctcaaatttgaaaaacctccttccttctcagtcatcgcggaactttaagtttgtgaaaggggatattggtagtgctgaccttgtaaactacctcctcattactgaatctattgacacaataatgcactttgcagcccaaactcatgttgataactcgtttgggaacagttttgagtttaccaagaacaatatctacggcactcatgtcctgcttgaagcttgcaaagtcactggccagatcaggaggttcatccatgtaagcacggatgaggtttacggggagacagatgaggatgctgttgtaggaaaccacgaggcttcccaacttctcccgacaaacccgtactctgcaacaaaagctggtgctgaaatgcttgtaatggcatatggtagatcatatggattacctgtgattacaacccgtggaaacaatgtttatggccccaaccagttcccagaaaagttgattcctaagtttatcctcttagcaatgagggggaaggttctcccaattcatggggatggtactaatgtgaggagttatttatactgcgaggatgtggctgaggcatttgaggtcattcttcacaagggtgaagttggtcatgtttataatgttggaacaaagaaggagaggagagtgattgatgtagccaaagatatatgcaaacttttttcaatggactcggagacaagcatcaagtttgttgaaaacagaccatttaacgaccagaggtattttcttgatgatcagaaattgaagaacttgggatggtctgagcgaactgtgtgggaagatggcttgaagaagaccatagaatggtacactcaaaatcctgattggtggggcgatgtgtctggtgcactgcttccacacccgagaatgctgatgatgcctggcgggagacaatttgattcagaagagggaaaagatacatcgtatataagttctcctagtcagacccaaatggtagttccgacctccaaaagtagtgtctcttctcaaaaaccagccttgaagttcttgatttatggcaggactggctggatcgggggtctactaggtcagttatgtgataagcaaggtattccctttgaatatggaaaaggaaggttggaagatcgttcgtcacttacagcagatattcggaatataaaaccgacccatgtttttaatgctgctggtgtgaccggtagacccaatgttgattggtgtgaatcccacaaaacagaaacaattcgcactaatgtggccggaaccttgaccttggctgatgtttgccgagagcatgggcttttgatgatgaactttgctactgggtgtatattcgagtatgatgcaggacatcctcagggctctggcattggttttaaagaggaagacaaacccaatttcaccggttccttctactcaaaaaccaaggctatggttgaagagttgctgaaagaatacaacaatgtctgcaccctcagagttcgaatgccaatctcatctgacctaaacaaccctcgcaacttcatcaccaagatttcaagatacagcaaggtggtcaacattcccaacagcatgacaatcttggacgaacttctaccgatttctatcgagatggcaaagaggaacttgacgggcatatggaacttcacgaaccctggcgttgtgagccacaatgagatcctggagatgtacaagaagtacattgacccgaaattccagtgggcgaacttcacattggaagaacaagccaaggtgatcgttgcccctcgaagcaataacgagatggacgcatccaagttgaaaaaagagttccctgagttgctaccgatcaaggaatcattgattaagtacgtcttcgaacccaacaaaagaacctgacccttttaaacaggtttttcatctatagtagtaccccatgattaacctccgcatctgtttagtttcattcatttgttactgttatcagcccactcattaattttactcgaaaactataggttttctttttccatctttcgtcattactagctgcagctgagttgtatcttagttttcttagcagtcgcttaatggagaagctctcatgagctacttcataatttgtgtcatctgcaggctgtcaggtgtattatttttacattacaattagttgaatatatggctttcaatactcg

SEQ ID NO: 2734 - protein, 667 aa, Gossypium hirsutum
  misc_feature (9)..(251): Pfam Name: Epimerase Pfam Description: NAD dependent epimerase/dehydratase f
  misc_feature (383)..(661): Pfam Name: RmlD_sub_bind Pfam Description: RmlD substrate binding domain
  misc_feature: Ceres Clone ID no. 1920196
  misc_feature: Bit score of 1879.2 for HMM based on sequences of Figure 28
  misc_feature: Functional Homolog Of SEQ ID NO. 2708
MATYTPKNILITGAAGFIASHVANRLVRNYPDYKIVVLDKLDYCSNLKNLLPSQSSRNFKFVKGDIGSADLVNYLLITESIDTIMHFAAQTHVDNSFGNSFEFTKNNIYGTHVLLEACKVTGQIRRFIHVSTDEVYGETDEDAVVGNHEASQLLPTNPYSATKAGAEMLVMAYGRSYGLPVITTRGNNVYGPNQFPEKLIPKFILLAMRGKVLPIHGDGTNVRSYLYCEDVAEAFEVILHKGEVGHVYNVGTKKERRVIDVAKDICKLFSMDSETSIKFVENRPFNDQRYFLDDQKLKNLGWSERTVWEDGLKKTIEWYTQNPDWWGDVSGALLPHPRMLMMPGGRQFDSEEGKDTSYISSPSQTQMVVPTSKSSVSSQKPALKFLIYGRTGWIGGLLGQLCDKQGIPFEYGKGRLEDRSSLTADIRNIKPTHVFNAAGVTGRPNVDWCESHKTETIRTNVAGTLTLADVCREHGLLMMNFATGCIFEYDAGHPQGSGIGFKEEDKPNFTGSFYSKTKAMVEELLKEYNNVCTLRVRMPISSDLNNPRNFITKISRYSKVVNIPNSMTILDELLPISIEMAKRNLTGIWNFTNPGVVSHNEILEMYKKYIDPKFQWANFTLEEQAKVIVAPRSNNEMDASKLKKEFPELLPIKESLIKYVFEPNKRT

SEQ ID NO: 2735 - protein, 664 aa, Arabidopsis thaliana
  misc_feature (9)..(251): Pfam Name: Epimerase Pfam Description: NAD dependent epimerase/dehydratase f
  misc_feature (380)..(658): Pfam Name: RmlD_sub_bind Pfam Description: RmlD substrate binding domain
  misc_feature: Public GI ID no. 15231926
  misc_feature: Bit score of 1815.0 for HMM based on sequences of Figure 28
  misc_feature: Functional Homolog Of SEQ ID NO. 2708
MATYKPKNILITGAAGFIASHVANRLVRSYPDYKIVVLDKLDYCSNLKNLNPSKSSPNFKFVKGDIASADLVNYLLITEEIDTIMHFAAQTHVDNSFGNSFEFTKNNIYGTHVLLEACKVTGQIRRFIHVSTDEVYGETDEDASVGNHEASQLLPTNPYSATKAGAEMLVMAYGRSYGLPVITTRGNNVYGPNQFPEKLIPKFILLAMNGKPLPIHGDGSNVRSYLYCEDVAEAFEVVLHKGEVNHVYNIGTTRERRVIDVANDISKLFGIDPDSTIQYVENRPFNDQRYFLDDQKLKKLGWCERTNWEEGLRKTMEWYTENPEWWGDVSGALLPHPRMLMMPGDRHSDGSDEHKNADGNQTFTVVTPTKAGCSGDKRSLKFLIYGKTGWLGGLLGKLCEKQGIPYEYGKGRLEDRASLIADIRSIKPSHVFNAAGLTGRPNVDWCESHKTETIRVNVAGTLTLADVCRENDLLMMNFATGCIFEYDAAHPEGSGIGFKEEDKPNFTGSFYSKTKAMVEELLREFDNVCTLRVRMPISSDLNNPRNFITKISRYNKVVNIPNSMTILDELLPISIEMAKRNLRGIWNFTNPGVVSHNEILEMYKSYIEPDFKWSNFNLEEQAKVIVAPRSNNEMDGAKLSKEFPEMLSIKDSLIKYVFEPNKRT

SEQ ID NO: 2736 - protein, 667 aa, Arabidopsis thaliana
  misc_feature (11)..(253): Pfam Name: Epimerase Pfam Description: NAD dependent epimerase/dehydratase f
  misc_feature (383)..(661): Pfam Name: RmlD_sub_bind Pfam Description: RmlD substrate binding domain
  misc_feature: Public GI ID no. 42562732
  misc_feature: Bit score of 1803.2 for HMM based on sequences of Figure 28
  misc_feature: Functional Homolog Of SEQ ID NO. 2708
MDDTTYKPKNILITGAAGFIASHVANRLIRNYPDYKIVVLDKLDYCSDLKNLDPSFSSPNFKFVKGDIASDDLVNYLLITENIDTIMHFAAQTHVDNSFGNSFEFTKNNIYGTHVLLEACKVTGQIRRFIHVSTDEVYGETDEDAAVGNHEASQLLPTNPYSATKAGAEMLVMAYGRSYGLPVITTRGNNVYGPNQFPEKMIPKFILLAMSGKPLPIHGDGSNVRSYLYCEDVAEAFEVVLHKGEIGHVYNVGTKRERRVIDVARDICKLFGKDPESSIQFVENRPFNDQRYFLDDQKLKKLGWQERTNWEDGLKKTMDWYTQNPEWWGDVSGALLPHPRMLMMPGGRLSDGSSEKKDVSSNTVQTFTVVTPKNGDSGDKASLKFLIYGKTGWLGGLLGKLCEKQGITYEYGKGRLEDRASLVADIRSIKPTHVFNAAGLTGRPNVDWCESHKPETIRVNVAGTLTLADVCRENDLLMMNFATGCIFEYDATHPEGSGIGFKEEDKPNFFGSFYSKTKAMVEELLREFDNVCTLRVRMPISSDLNNPRNFITKISRYNKVVDIPNSMTVLDELLPISIEMAKRNLRGIWNFTNPGVVSHNEILEMYKNYIEPGFKWSNFTVEEQAKVIVAARSNNEMDGSKLSKEFPEMLSIKESLLKYVFEPNKRT

SEQ ID NO: 2737 - DNA, 2229 bp, Gossypium hirsutum
  misc_feature: Ceres Clone ID no. 1924612
  misc_feature: Encodes the peptide sequence at SEQ ID NO. 2738
aatttccctctccgtcaaaagattcatctcccctactctaaatttctctcttttccttcttctatcaatactttctatctctgtaatttttttttcgatttctgtctctggattttgattgatttctatccaacttaattgaatatggcttcttataaacccaagaatatcctgataactggggctgctgggtttattgcatctcatgttgccaatcggcttgttcggaactaccccgagtacaagattgttgtacttgataagcttgattactgctcaaacactaaaaacctccttccttccaagttatccccaaactttaagtttgtgaagggggacattgaaagtgctgatcttgttaactatcttcttatcacggagtctattgacacaataatgcactttgcagcacaaactcatgttgataattcatttgggaacagtttcgagtttacaaagaacaatatttatggcactcatgtcctacttgaagcttgcaaagtcacaggtcagattaggaggttcatccatgttagcaccgatgaggtttacggggagacggacgaggatgcagttgtaggaaaccatgaagcttcccaacttctcccaacgaacccgtattctgcaacaaaagcaggtgctgaaatgcttgttatggcatatgggaggtcatatggattacctgtaattacgacccgtggaaacaatgtttatggtcccaatcagtttccggaaaaattaattcccaagtttatcttattggcaatgagggggaagactcttccgattcatggggatggttctaatgtgaggagttatttatactgtgaggatgttgctgaagcatttgaagtcattcttcacaagggtgaagttggtcgtgtttataatattggcacgaagaaagaaaggagagtgattgatgtagctagagatatatgcaaacttttctcgatggatcctgagacaagcattgagtttgtcgaaaacagaccgttcaatgaccagaggtattttcttgatgatcagagattgaagaacttgggatggtccgagcgaactgtatgggaagacgggttgaagaagaccataaaatggtacactcaaaaccctgattggtggggtgatgtgactggtgcgttgcttccgcacccaagaatgttgatgatgcctggaagtacacacttcgattccgaggacggcaaagagacatcatatgtaagtggtcctaatcaggcccgaatggtggttccaacccccaagggcggtagctctccccaaaaacaatccttgaagttcttgatctatggcaggactggctggataggtggtttacttggtcagttatgcgagaaacaaggtattgccttcgaatatggaaaaggacgcttggaagatcgttcatcactcaatgcagatattcaaaatataacgccgacccatgtgtttaatgctgctggtgttaccggcagacctaatgttgattggtgtgaatctcacaaaacagaaacaattcgtgccaatgtggctggtactttaaccttggcagatgtttgcagagaccatgggctgttgatgatgaatttcgctaccgggtgtatatttgagtatgatactgcacatcctcagggctctggcattggatttaaagaggaagataaacccaatttcatcggttccttctattcaaaaaccaaggccgtggttgaagagctgttgaaagagtatgacaacgtctgcacccttagagttcgaatgccaatctcatctgacctaaacaatccacgcaacttcatcaccaagatttcacgctacaacaaggtggtcaacattcccaacagcatgacagtcttggacgaacttctaccgatatcgatcgagatggcaaagaagaacttgaggggtatatggaacttcacaaaccctggggttgtgagccacaatgagatcctcgagatgtacaagacttacattgaccccaagtttaagtgggaaaacttcacattagaagaacaagccaaggtgatcgttgcaccccgaagcaataacgagatggatgcatccaagttgaagaaggagttccctgagttgttatccatcaaagaatcactgattaagtatgcctttgaaccgaacaggagaacctgagcttattaagcaggtttcagcttatagattctatactttctgcacctaatattatatgatcaggaatatcttttaagctcc

SEQ ID NO: 2738 - protein, 667 aa, Gossypium hirsutum
  misc_feature (9)..(251): Pfam Name: Epimerase Pfam Description: NAD dependent epimerase/dehydratase f
  misc_feature (383)..(661): Pfam Name: RmlD_sub_bind Pfam Description: RmlD substrate binding domain
  misc_feature: Ceres Clone ID no. 1924612
  misc_feature: Bit score of 1844.4 for HMM based on sequences of Figure 28
  misc_feature: Functional Homolog Of SEQ ID NO. 2708
MASYKPKNILITGAAGFIASHVANRLVRNYPEYKIVVLDKLDYCSNTKNLLPSKLSPNFKFVKGDIESADLVNYLLITESIDTIMHFAAQTHVDNSFGNSFEFTKNNIYGTHVLLEACKVTGQIRRFIHVSTDEVYGETDEDAVVGNHEASQLLPTNPYSATKAGAEMLVMAYGRSYGLPVITTRGNNVYGPNQFPEKLIPKFILLAMRGKTLPIHGDGSNVRSYLYCEDVAEAFEVILHKGEVGRVYNIGTKKERRVIDVARDICKLFSMDPETSIEFVENRPFNDQRYFLDDQRLKNLGWSERTVWEDGLKKTIKWYTQNPDWWGDVTGALLPHPRMLMMPGSTHFDSEDGKETSYVSGPNQARMVVPTPKGGSSPQKQSLKFLIYGRTGWIGGLLGQLCEKQGIAFEYGKGRLEDRSSLNADIQNITPTHVFNAAGVTGRPNVDWCESHKTETIRANVAGTLTLADVCRDHGLLMMNFATGCIFEYDTAHPQGSGIGFKEEDKPNFIGSFYSKTKAVVEELLKEYDNVCTLRVRMPISSDLNNPRNFITKISRYNKVVNIPNSMTVLDELLPISIEMAKKNLRGIWNFTNPGVVSHNEILEMYKTYIDPKFKWENFTLEEQAKVIVAPRSNNEMDASKLKKEFPELLSIKESLIKYAFEPNRRT

SEQ ID NO: 2739 - protein, 666 aa, Physcomitrella patens subsp. patens
  misc_feature (7)..(249): Pfam Name: Epimerase Pfam Description: NAD dependent epimerase/dehydratase f
  misc_feature (379)..(657): Pfam Name: RmlD_sub_bind Pfam Description: RmlD substrate binding domain
  misc_feature: Public GI ID no. 168054569
  misc_feature: Bit score of 1771.2 for HMM based on sequences of Figure 28
  misc_feature: Functional Homolog Of SEQ ID NO. 2708
MHEPKNILITGAAGFIASHVANRLIRNYPHYKIVVLDKLDYCSNLKNLFPSKGSKNFKFVKGDIASADLVNFLLITEGIDTIMHFAAQTHVDNSFGNSFEFTKNNIYGTHVLLEACKVTGQIKRFIHVSTDEVYGETEVEAIVGNHEASQLLPTNPYSATKAGAEMLVMAYAKSYGLPCITTRGNNVYGPNQFPEKLIPKFILLAMQGKALPIHGDGSNVRSYLYCEDVAEAFECVLHKGEVGHVYNIGTKKERRVIDVAKDVCELFNLDYKKSIKMVDNRPFNDQRYFLDDKKLIALGWQERTSWAEGLRKTKDWYMSNPDWWGDVSGALVPHPRALTMPGLEKLAEMQRGESLGQSDDAADLVEESGSALSNGDPSLKFLLYGRTGWLGGLLGKMCEERGIAYKYGSGRLENRSSLEADIAAVKPTHVFNAAGVTGRPNVDWCESHKVETIRANVVGTLTLADVCKQNGLLLMNYATGCIFEYDEKHPLGSGVGFKEEDTPNFAGSYYSKTKAMVEDLLKEFDNVCTLRVRMPISSDLQNPRNFISKIVRYQKIVNIPNSMTILDELLPISIEMAKRNLTGIWNFTNPGVVSHNEIMDMYKEYIDPSLTWENFTLEEQAKVIVAARSNNEMDASKLLSEFPEMLGIKESLKKFVFEPNRKTVAK

SEQ ID NO: 2740 - protein, 677 aa, Physcomitrella patens subsp. patens
  misc_feature (15)..(257): Pfam Name: Epimerase Pfam Description: NAD dependent epimerase/dehydratase f
  misc_feature (389)..(667): Pfam Name: RmlD_sub_bind Pfam Description: RmlD substrate binding domain
  misc_feature: Public GI ID no. 168028758
  misc_feature: Bit score of 1775.5 for HMM based on sequences of Figure 28
  misc_feature: Functional Homolog Of SEQ ID NO. 2708
MVNPGGSQGYVPKNILITGAAGFIASHVANRLIRNYPHYKIVVLDKLDYCSNLKNLFPSKASKNFKFVKGDIASADLVNYLLITEGIDTIMHFAAQTHVDNSFGNSFEFTKNNIYGTHVLLEACKVTGQIKRFIHVSTDEVYGETEAEAIVGNHEASQLLPTNPYSATKAGAEMLVMAYGRSYGLPCITTRGNNVYGPNQFPEKLIPKFILLAMQGKPLPIHGDGSNVRSYLYCEDVAEAFECVLHKGVIGNVYNIGTKKERRVIDVAKDICELFNLDYKKSIKMVDNRPFNDQRYFLDDKKLIDLGWQERTSWVDGLQKTKDWYTSHPDWWGDVSGALVPHPRALTMPGTAAENGAAATSNGTSNGLADGIVSKVVDPIKNLVRNPDLKFLVYGRTGWLGGLLGKLCEKQGIAYEYGSGRLENRSSLEADIAAVKPTHVFNAAGVTGRPNVDWCESHKVETIRANVVGTLTLADVCKQNSLVLINYATGCIFEYDEKHPLGSGIGFKEEDTPNFAGSYYSKTKAMVEDLLNEFDNVCTLRVRMPISSDLQNPRNFISKIVRYQKIVNIPNSMTILDELLPISIEMAKRNLTGIWNFTNPGVVSHNEIMEMYKEYIDPELSWVNFTIEEQAKVIVAARSNNEMDASKLKKEFPEMLGIKESLKKYVFEPNRQTPVSK

SEQ ID NO: 2741 - protein, 657 aa, Vitis vinifera
  misc_feature (13)..(255): Pfam Name: Epimerase Pfam Description: NAD dependent epimerase/dehydratase f
  misc_feature (375)..(518): Pfam Name: RmlD_sub_bind Pfam Description: RmlD substrate binding domain
  misc_feature: Public GI ID no. 225464343
  misc_feature: Bit score of 1644.6 for HMM based on sequences of Figure 28
  misc_feature: Functional Homolog Of SEQ ID NO. 2708
MSSGPAPYVPRNILITGAAGFIASHVTNRLVKNHPDYRIVALDKLDYCSNVKNLGPSRSSSNFKFVKGDIVCADLVNHLLVAEDIDTIMHFAAQTHVDNSFGNSFEFTNNNIYGTHVLLEACKVTKRIKRFIHVSTDEVYGETDLDTDIGNPEASQLLPTNPYSATKAGAEMLVMAYHRSYGLPTITTRGNNVYGPNQFPEKLIPKFILLAMKGEQLPIHGDGSNVRSYLYCEDVAEAFEVVLHKGVIGHVYNIGTKKERSVLDVAEDICKLFRLDSKQAINFVHDRPFNDKRYFLDDQKLKKLGWEERTPWEEGLRRTMEWYTKNPGWWGDVSAALHPHPRISMIAFPNDDQCFLQYGCDKDCSPASKSSGLKFLIYGRTGWIGGLLGKLCKDGGIEFEYGKGRLQDRKTLMEDIRRVQPTHVFNAAGVTGRPNVDWCESHKVETIRTNVLGTLTLADVCKEQGLLMMNFATGCIFEYDEEHPEGSGVGFKEEDKPNFVGSFYSKTKAMVEELLREYENVCTLRVRMPISSDLSNPRNFITKIARYNKVVNIPNSMTVLDELLPISIEMAKRNCRGIWNFTNPGVVSHNEILEMYRDYIDPGFEWVNFNLEEQAKVIVAPRSNNELDASKLKKEFPELLSIKESIIKYVFEPNKKS

SEQ ID NO: 2742 - DNA, 2010 bp, Populus balsamifera subsp. trichocarpa
  misc_feature: Ceres Annot ID no. 1480867
  misc_feature: Encodes the peptide sequence at SEQ ID NO. 2743
atgtcttctgatcctgctccatatgcgccgagaaagatcctcattaccggtgctgccggatttatagcctctcatgtgattcgtagattgatcaaggactatcctgattacaagattgttgcccttgacaagctagactactgctccaacctcaagaaccttgctacatgtcgcggctcgccgaatttcaagtttgttaagggtgatattgcttgtgctgatcttgtaaatcacctgttgattgctgaggatattgatacgatcatgcattttgctgctcaaactcatgtggataattcatttgggaattcatttgaattcacaaccaacaatatatatggcactcatgtgcttcttgaagcctgtaaggtcacaaagaaaatcaagaggttcattcatgttagtaccgatgaagtttatggtgaaactgatatggagacagacattggcaatcctgaggcttctcagcttcttcctacaaatccttactctgcgacgaaagcaggggctgaaatgttggtcatggcttatcatagatcttatggccttcctatcattaccactagaggcaacaatgtgtatggccctaaccagtatcctgaaaagcttatccccaaatttattctcctggctctcaaaggagagcagttgccgattcatggtgatggatcgaatgttagaagctttttatactgcgaggatgtggcagaggcatttgatgtgatacttcacaagggagctattggacatgtttataatatagggaccaagaaggagaggcgagtcctcgatgtggcagaggatatctgtaagctgtatggattggatcctgaaaaatctatcaactatgttcaagataggcctttcaacgatcatcgatatttcttggatgatcaaaagctcaagaagcttgggtggcaggaaagtactccttgggaggaagggctaaagatgacaatggaatggtacacgaagaatcctgattggtgggatgatgtatctgctgctcttcacccacatccacgcttgagtatgattgctcaatccaatgatgattcatggttctctcagaagggactcataagtgatgcaaaggaagctggtaaaagtgatggcagttcaggactaaagttcttgatatatggcaagacaggttggataggggggttgctagggaagctttgtaaggatgggggcattgcatttgagtatggtcagggaagattggaagatagaaagtcaattctcaaggatataaagaacataaatccaacccatgtgttcaatgctgctggggttactggaaggcctaatgttgattggtgcgaatcgcacaaggtagaaacaattaggactaatgtggtaggtacattgactttagcagatgtttgcaaggagcataatctcttgatgatgaattttgcaactggctgcatatttgaatatgatcaagatcatcaagaaggatcaggaattggattcaaagaggaggataaaccgaatttcacaggatctttctactccaaaaccaaggccatggtaacaaatacacaacccttcttccatgtggaggagctgctgagagaatatgagaacgtttgcacgctgcgagtccggatgccaatatcatccgatctcagcaacccaagaaatttcataacgaagatcactcgttacgacaaagtggtaaacataccaaatagcatgacagtgctagatgagctcctgccaatctcaatcgagatggcaaaaagaaattgcagaggaatatggaacttcaccaatccaggagtggtaagccacaacgagatcttagaaatgtaccgagactacatcgaccctgaattcaaatggatgaattttgatctagaagagcaggccaaggtgatagtagcaccaaggagcaacaatgagctggatggtacaaagctgaagaatgaattccctgaaacgttatcaattaaagaatcaatacttgagtatgtattcaagcccaacaagaagacttga

SEQ ID NO: 2743 - protein, 669 aa, Populus balsamifera subsp. trichocarpa
  misc_feature (13)..(255): Pfam Name: Epimerase Pfam Description: NAD dependent epimerase/dehydratase f
  misc_feature (406)..(514): Pfam Name: RmlD_sub_bind Pfam Description: RmlD substrate binding domain
  misc_feature: Ceres Annot ID no. 1480867
  misc_feature: Bit score of 1612.1 for HMM based on sequences of Figure 28
  misc_feature: Functional Homolog Of SEQ ID NO. 2708
MSSDPAPYAPRKILITGAAGFIASHVIRRLIKDYPDYKIVALDKLDYCSNLKNLATCRGSPNFKFVKGDIACADLVNHLLIAEDIDTIMHFAAQTHVDNSFGNSFEFTTNNIYGTHVLLEACKVTKKIKRFIHVSTDEVYGETDMETDIGNPEASQLLPTNPYSATKAGAEMLVMAYHRSYGLPIITTRGNNVYGPNQYPEKLIPKFILLALKGEQLPIHGDGSNVRSFLYCEDVAEAFDVILHKGAIGHVYNIGTKKERRVLDVAEDICKLYGLDPEKSINYVQDRPFNDHRYFLDDQKLKKLGWQESTPWEEGLKMTMEWYTKNPDWWDDVSAALHPHPRLSMIAQSNDDSWFSQKGLISDAKEAGKSDGSSGLKFLIYGKTGWIGGLLGKLCKDGGIAFEYGQGRLEDRKSILKDIKNINPTHVFNAAGVTGRPNVDWCESHKVETIRTNVVGTLTLADVCKEHNLLMMNFATGCIFEYDQDHQEGSGIGFKEEDKPNFTGSFYSKTKAMVTNTQPFFHVEELLREYENVCTLRVRMPISSDLSNPRNFITKITRYDKVVNIPNSMTVLDELLPISIEMAKRNCRGIWNFTNPGVVSHNEILEMYRDYIDPEFKWMNFDLEEQAKVIVAPRSNNELDGTKLKNEFPETLSIKESILEYVFKPNKKT

SEQ ID NO: 2744 - DNA, 2031 bp, Solanum lycopersicum
  misc_feature: Ceres Annot ID no. 8464234
  misc_feature: Encodes the peptide sequence at SEQ ID NO. 2745
atgtcgtccgaaccagctccttatgtacccaaaaatgtcctcataacgggtgcagcaggcttcattccgtctcatgtaaccaatagattgaccaagctatatcctaactacaggattgttgctcttgacaagctcgattattgttcgagtctaaaaaatttggagccaagttactcgtgtccgaatttcaaatttgtcaaggctgatattactagtgctgatcttatcaaccatcttctggttgaggagaagattgatacaattatgcattttgcagcacagactcatgtggataattcatttggaaattcgtttgagttcaccattaataatatttacggtactcatgtgcttcttgaggcttgtaagttgactaaatgcatcaagagattcattcatgttagtaccgatgaagtttatggcgagactgatttggaaactgacattggcaatcctgaagcttctcaactccttcctactaatccatattccgcgactaaagctggagcagaaatgcttgtcatggcttataataggtcttatggcctaccaacaatcactactcgagggaataacgtgtatggcccaaatcagttccctgagaagttgatcccaaagttcattattctagcaatgaagggtgagcgtttgccaattcatggcgatggaacaaatgttaggagctatttgtactctgctgatgttgctgaggcatttgatgtgatactgcacaaaggggttattggacatgtgtataacattggtactaagaaagagagggcagttttggacgtggctgcggatatatgcaaattggttggaaagaatgctaaagaagttatcgagcttgtacaagataggccttttaatgatcaaaggtatttcctggatgatcaaaagcttaagaagttagggtggcaagaaaggactacttgggaggcaggactaaagatgacactcgattggtacacaaaaaatcccgattggtggggtgatataaccggagcccttcacccacatcccagaatctcaaacatcgcgccttcacatgatgaagggtgtctgttgcagcttgtaaaaggaagcaagaaagcatctggctcagacttaaagttcttgatttacggaaaaacaggttggattggagggttgttaggaaagatttgtgaagaacgtggaatagcatacgagtatggattaggacgactacaggataggagttctctaatgcaagacatgataagagtaaagccaactcatgttttcaacgcggctggtgttactgggaggcctaatgtggattggtgtgaatcacacaaagtagaaacaattagaacgaatgttgctggtacactaactttagctgatatctgcagagaggctgatatcttagtgatgaatttcgcgacaggttgcatatttgaatatgatgagcagcatccactaggctcaggcatcggattcaaagaagaagacaaaccaaattttacaggatccttctactcgaaaaccaaagccatggtggaagagcttctaaaagaatacaacaacgtttgcactctcagagtaagaatgccaatatcatcagaccttagtaacccaagaaacttcatcacaaagatcacgcgttatgataaagtggtaaacatcccaaacagcatgacagttctagatgagctactaccaatctctatcgaaatggcaaagagaaactgtagaggtatatggaacttcacaaatccgggagttgtgagccacaacgagattctagagatgtacagagactacattgatcctaaattcaaatggcagaatttcgatcttcaagaacaagctaaagtgatcgttgcaccgcgaagtaacaatgagcttgacatgacaaagctgaaaaatgagtttccagaattgctatcaatcaaagattcaatcatcaagctattatacaatgaaggatttatccggtgcgcacaaagtgcttacccgaaaagcagatgctccgacagaaattatagcggttacggattatcctga

SEQ ID NO: 2745 - protein, 676 aa, Solanum lycopersicum
  misc_feature (13)..(255): Pfam Name: Epimerase Pfam Description: NAD dependent epimerase/dehydratase f
  misc_feature (401)..(516): Pfam Name: RmlD_sub_bind Pfam Description: RmlD substrate binding domain
  misc_feature: Ceres Annot ID no. 8464234
  misc_feature: Bit score of 1567.2 for HMM based on sequences of Figure 28
  misc_feature: Functional Homolog Of SEQ ID NO. 2708
MSSEPAPYVPKNVLITGAAGFIPSHVTNRLTKLYPNYRIVALDKLDYCSSLKNLEPSYSCPNFKFVKADITSADLINHLLVEEKIDTIMHFAAQTHVDNSFGNSFEFTINNIYGTHVLLEACKLTKCIKRFIHVSTDEVYGETDLETDIGNPEASQLLPTNPYSATKAGAEMLVMAYNRSYGLPTITTRGNNVYGPNQFPEKLIPKFIILAMKGERLPIHGDGTNVRSYLYSADVAEAFDVILHKGVIGHVYNIGTKKERAVLDVAADICKLVGKNAKEVIELVQDRPFNDQRYFLDDQKLKKLGWQERTTWEAGLKMTLDWYTKNPDWWGDITGALHPHPRISNIAPSHDEGCLLQLVKGSKKASGSDLKFLIYGKTGWIGGLLGKICEERGIAYEYGLGRLQDRSSLMQDMIRVKPTHVFNAAGVTGRPNVDWCESHKVETIRTNVAGTLTLADICREADILVMNFATGCIFEYDEQHPLGSGIGFKEEDKPNFTGSFYSKTKAMVEELLKEYNNVCTLRVRMPISSDLSNPRNFITKITRYDKVVNIPNSMTVLDELLPISIEMAKRNCRGIWNFTNPGVVSHNEILEMYRDYIDPKFKWQNFDLQEQAKVIVAPRSNNELDMTKLKNEFPELLSIKDSIIKLLYNEGFIRCAQSAYPKSRCSDRNYSGYGLS

SEQ ID NO: 2746 - protein, 689 aa, Ostreococcus tauri
  misc_feature (5)..(248): Pfam Name: Epimerase Pfam Description: NAD dependent epimerase/dehydratase f
  misc_feature (414)..(515): Pfam Name: RmlD_sub_bind Pfam Description: RmlD substrate binding domain
  misc_feature: Public GI ID no. 116056148
  misc_feature: Bit score of 1112.9 for HMM based on sequences of Figure 28
  misc_feature: Functional Homolog Of SEQ ID NO. 2708
MSTTILLTGGAGFIASHVVRLLAEKYPKYKIVVLDKLDYCASMKNLESTRHLLNVEFIKGDIRSVDLLNFIFQKNTIDVVLHFAAQSHVDNSFGNSFEFTKNNVEGTHALLEATKRAGTVTRFVHVSTDEVYGESSFEHDSSNTEHASLLAPTNPYSATKAGAEMLVMAYGRSYGLPFIITRGNNVYGPNQYPEKAIPKFSILAATGQKISLHGDGLATRSYMHVDDAAAAFDCILHRGTVSHVYNIGAHEERTVLSVARDICEILRRDPTETITHVRDRAFNDRRYFIDCSKLLALGWTQRVSWEEGLRKTVEWYSTEDLRSFWGDFAPALTPHPSLTITHSSTSLHTLADVNDACAPEELVDEKSTPAVTFLIYGKTGWIGGMLGRLLADRKLAYFYGAARLHDGKGVQEDIDRCRPTHILNAAGITGRPNVDWCESHKREVVQTNVLGTLNLIDIARSRGIHVTNFATGCIYSYDDEHPVGGPGFTETDVANFRGSYYSNTKAMVEELIQQYDNVLQLRLRMPIDDDLLNPRNFIYKIANYEKVVDVPNSMTVLNELVPLAIDGALRKLTGIYNFTNPGVVSHNEVLQLYREYCDGEFTWENFTLEEQSKILAAPRSNNMLDTKKLEQTFPGLLDIRSALIKHVFEINRARGAPRAGRIGLGGTGIGFKADLWNRAFWQGQPPIDQ

SEQ ID NO: 2747 - DNA, 2212 bp, Panicum virgatum
  misc_feature: Ceres Clone ID no. 1790340
  misc_feature: Encodes the peptide sequence at SEQ ID NO. 2748
gtttatcgcttctgcttgttttggagccatctttggcagtgttctttattgctatctagcagcctctttgctgtccttctcagccaatttactctcacctggggcctgggggcttgcatgccatcaatgctcccctgaggtgtttatcatgtgaacatctgcattttgctatcacgggaaatcccctctcatggtccactgtattctgtaggtggagtttggctggacttcatttattcccaaagattcgagcttttggagctttaataggtcacaactcacaactcacaaattctcctggcgcttgaggaaactttggccgccccctcgggaggagctcttgcaattctagaggcttcgagaatttcaacttttttttaggcttcgagagctcaagagttggatttctgaaaccattctagaggtttgctctcgccgatttccaagatttcttctttatctcttcgtttccaagatctgagcttgaggattctttctgcaaagcagagcaatccacctaaaccgtcctaagatttggagctggaataatccaccgatgggttccgggttcggccatggagcggcggcggtggccgtggcgctggtttcttggctgtgcttcgcttcagcgggcgtcggcgcgataggggcgaactggggcacgcagacgagccacccgctcccgccggacacggtggtgcggatgctcaaggacaacgggttccagaaggtgaagctgttcgacgccgaggagggcaccatgaacgccctcaagaagagcgggctggaggtgatggtcggcatccccaacgacatgctgctgacgatggcctccaacataaagtccgccgagaagtgggtgtacacgaacgtctccagctacctcaacgacggcgtcaacatccggtacgttgcagttgggaatgagccatttttggagacatacaatggaagctttctgcaaaccacttatcccgccatcagaaacattcaaagtgcacttataaaggctggtttgggcaatcaagttagagtcacatgccctctgaatgccgatgtctatgcatcaccaaccaccaagccttctgacggggacttccgcacagatattcatgatctgatgatcgctattgtaaaattgctcagcgacaatggtggagctttcactgtcaacatataccctttcataagcctctacattgatccaaatttccctgtggactatgccttctttgaaggggcctcgtcacccattgttgatggttccattacttacacaaacatgttcgatgcgaaccatgacacacttatatgggctctgaaaaagaatggctttggaaacctcccagtcattgttggggagatcggatggcctactgatggggacaggaacgctaatgctcagatggctcagcgcttcaaccaaggcttcatgactcatattgcctctggtcgaggaacgccgatgcggcctggacctgttgatgcttacttgttcagtctaattgacgaggacgagaagagcatccaaccaggaaattttgagcggcactggggtatctttacttatgacggatggccaaaataccaactgaatctcgggacagcaaattcaggcggccttgtgagagcaaagggcgtgaagtaccttgaaaagaagtggtgtgtactgaagccttcagtgcccctcaacgatccgaagatcgcagacaatgtgggttatgcatgttccatggcagactgtaccagccttggttataagacttcatgcgggatgctggacgaaagtggtaacatctcatatgcgttcaacaactactaccagaagaacgaccaagatgatgttgcctgtgggtttcaaaacctcgcgaccaccaccggccaagaccccagcactgggacatgcagatttggtatcatgatagaggtcgactctgccttctcattggggctgcagcggcttggaagcaacttcttcttgatgctcctgcttgtgcttctccagctatgcctgtcgttctcataaatgcttgttttctggagatgagcataaaagtataaacaatctgacagcttgaggatatttgatgtctgttgtcagtatcattcatgtaggaaccttttttgtttaaccttttttcttctcttctgaaggaaattgcggacagcggttccatccatgcttggattattgttaggttagatttgatcc

SEQ ID NO: 2748 - protein, 489 aa, Panicum virgatum
  misc_feature (30)..(348): Pfam Name: Glyco_hydro_17 Pfam Description: Glycosyl hydrolases family 17
  misc_feature (368)..(452): Pfam Name: X8 Pfam Description: X8 domain
  misc_feature: Ceres Clone ID no. 1790340
  misc_feature: Bit score of 1346.5 for HMM based on sequences of Figure 30
  misc_feature: Functional Homolog Of SEQ ID NO. 2748
  misc_feature: in Figure 30
MGSGFGHGAAAVAVALVSWLCFASAGVGAIGANWGTQTSHPLPPDTVVRMLKDNGFQKVKLFDAEEGTMNALKKSGLEVMVGIPNDMLLTMASNIKSAEKWVYTNVSSYLNDGVNIRYVAVGNEPFLETYNGSFLQTTYPAIRNIQSALIKAGLGNQVRVTCPLNADVYASPTTKPSDGDFRTDIHDLMIAIVKLLSDNGGAFTVNIYPFISLYIDPNFPVDYAFFEGASSPIVDGSITYTNMFDANHDTLIWALKKNGFGNLPVIVGEIGWPTDGDRNANAQMAQRFNQGFMTHIASGRGTPMRPGPVDAYLFSLIDEDEKSIQPGNFERHWGIFTYDGWPKYQLNLGTANSGGLVRAKGVKYLEKKWCVLKPSVPLNDPKIADNVGYACSMADCTSLGYKTSCGMLDESGNISYAFNNYYQKNDQDDVACGFQNLATTTGQDPSTGTCRFGIMIEVDSAFSLGLQRLGSNFFLMLLLVLLQLCLSFS

SEQ ID NO: 2749 - DNA, 1916 bp, Zea mays
  misc_feature: Ceres Clone ID no. 327425
  misc_feature: Encodes the peptide sequence at SEQ ID NO. 2750
aatatttcagcttcggcttttggaggtccacaaattctcgagttgttgggaaaatcgggctggcctcttattagagcccttttggcccttgctcctctttccagcagaggtttcaacttctctttcccccctgaggtttcgtgagcgcagcagtaaggtttctgaaactgttcttggaggtttgctctcgccggtttccactgtccctgctttatctgcctgggacggctccaagatctgagcttgggggcgttcttggtgcaaagcggagcaatccaccaaaccgccccgggatttggagctggaataatccttccatgggttcccggtccggctgtggagcggcgatggcggcggccgcggccgcggtgttggtttcttggctgtgcttcgcggcggccggcgtcggcgcgataggggcgaactggggcacgcaggcgagccacccgctgccgccggagacggtggtgcggatgctcaaggacaatgggttccagaaggtcaagctgttcgacgccgaggagggcaccatgagcgccctcaggaagagcgggctggaggtgatggtcggcatccccaacgacttgctgtccacgatggccaccagcatgaaggccgcggagaagtgggtcgacaccaacgtctccagctacctcaacgacggcgtcagcatcaggtatgttgcagtcgggaatgagcctttcttggagacatacaacggaagcttcctgcagtccactttccccgccatcaggaacatacaaggcgcgctcataaaagccggcctgggcaaccaagtcaaggtgacatgccctctcaacgccgatgtctactcctcgacgacctccaagccttccgacggggacttccgcacggacatccacgacctgatgctgaccatagtgaagttcctgagcgacaacggsggggccttcaccgtcaacatctacccgttcataagcctctacatcgacccgaacttccccgtggactacgccttcttcgagggggcctcgtcgccgatcgtggacggctccttcacctacagcaacatgttcgacgcgaaccacgacacgctgatatgggcgctgaagaagaacgggttcgggaacctgcccgtgatcgtcggcgagatcgggtggccgacggacggcgaccggaacgccaacgcccagatggcgcagcgcttcaaccagggcttcatgacccacatcgcctccgggcggggcacgccgatgcggcccggacccgtcgacgcctacctgttcagcctgatcgacgaggacgacaagagcatccagccagggaacttcgagcggcactggggcatcttcacctacgacggcctgcccaagtaccagctgaacctggggacgtcgaacgcgggcggcggtctcgtgagagccaagggcgtgaagtacctcgagaggaagtggtgcgtgctgaagccttctgtgaacctcaacgacccgaagctcgccgacaacgtgggatacgcgtgctccatggcggactgcaccagccttggctacaagacgtcgtgcgggatgctggacatccgcggcaacgtctcgtacgcgttcaacaactacttccagaagaacgaccaggacgacgtggcctgcgggttccagggcctcgcgacgaccacgggccaggaccccagcaccgggacctgcaggttcggggtcatgatcgaggtcgactccgccttctcgtggaggctgcaggggcttgggagcaacctcctcctgttcctcctgcttggggttctccagctatccctgtccttctcttagacgcagaggttctgcgagggatgggtggggtggcagtgagcgcataaacagtctgacaacagcttgaggatattagatgtgtgttgtcagtgccattcatttagaaactctttcctc

SEQ ID NO: 2750 - protein, 493 aa, Zea mays
  misc_feature (33)..(351): Pfam Name: Glyco_hydro_17 Pfam Description: Glycosyl hydrolases family 17
  misc_feature (372)..(456): Pfam Name: X8 Pfam Description: X8 domain
  misc_feature: Ceres Clone ID no. 327425
  misc_feature: Bit score of 1330.6 for HMM based on sequences of Figure 30
  misc_feature: Functional Homolog Of SEQ ID NO. 2748
  misc_feature: in Figure 30
  misc_feature (203)..(203): Xaa is any aa, unknown, or other
MGSRSGCGAAMAAAAAAVLVSWLCFAAAGVGAIGANWGTQASHPLPPETVVRMLKDNGFQKVKLFDAEEGTMSALRKSGLEVMVGIPNDLLSTMATSMKAAEKWVDTNVSSYLNDGVSIRYVAVGNEPFLETYNGSFLQSTFPAIRNIQGALIKAGLGNQVKVTCPLNADVYSSTTSKPSDGDFRTDIHDLMLTIVKFLSDNXGAFTVNIYPFISLYIDPNFPVDYAFFEGASSPIVDGSFTYSNMFDANHDTLIWALKKNGFGNLPVIVGEIGWPTDGDRNANAQMAQRFNQGFMTHIASGRGTPMRPGPVDAYLFSLIDEDDKSIQPGNFERHWGIFTYDGLPKYQLNLGTSNAGGGLVRAKGVKYLERKWCVLKPSVNLNDPKLADNVGYACSMADCTSLGYKTSCGMLDIRGNVSYAFNNYFQKNDQDDVACGFQGLATTTGQDPSTGTCRFGVMIEVDSAFSWRLQGLGSNLLLFLLLGVLQLSLSFS

SEQ ID NO: 2751 - protein, 489 aa, Oryza sativa subsp. japonica
  misc_feature (32)..(350): Pfam Name: Glyco_hydro_17 Pfam Description: Glycosyl hydrolases family 17
  misc_feature (368)..(452): Pfam Name: X8 Pfam Description: X8 domain
  misc_feature: Public GI ID no. 115444129
  misc_feature: Bit score of 1336.8 for HMM based on sequences of Figure 30
  misc_feature: Functional Homolog Of SEQ ID NO. 2748
  misc_feature: in Figure 30
MGSSWWWHGRAAAAVACWVWLAAAAAVGVEAIGANWGTQASHPLAPDTVVQMLKDNGFDKVKLFDAGEDTMSALRKSGLEVMVGIPNDMLAAMASSMAAANKWVDQNVSNYLNDGVKIRYVAVGNEPFLETYNGSFLQTTFPAIRNIQSALVKAGLGSQVRVTCPLNADVYQSSTSKPSDGDFRTDIHDLMLTIVKFLSDTGGAFTVNIYPFISLYSDSNFPVDYAFFDGAASPIVDGSATYTNMFDANYDTLIWALKKNGFGNLPVIVGEIGWPTDGDMNANIQMAQHFNQGFLTHIATGRGTPMRPGPVDAYLFSLIDEDEKSIQPGNFERHWGIFTYDGLPKYQLNLGQSHGLLKAKNVKYLERKWCVLKPSIGLTDPRLSDSISYACSLADCTSLGYKTSCGGLDTRSNISYAFNSYYQKNDQDDVACGFSNLATITGQDPSTGTCRFGIMIEVDSAFSWKLQHVRSSNLLMLLLVLLQLCLSFS

SEQ ID NO: 2752 - DNA, 1620 bp, Arabidopsis thaliana
  misc_feature: Ceres Clone ID no. 1152436
  misc_feature: Encodes the peptide sequence at SEQ ID NO. 2753
tggtctggaggaaatagtaccagctaagctcgcagctcaaagctcagtgtttaataattgtatagcttttttggtgaacgaagagtcagatcggcgagcctgagatgggttggggttcggtgttgctattactggcggtggctcttctttgtcagagggcaagttcaatcggagctaactggggcacacaggcgtcgcacccacttccaccggacatagttgtgcggatgctaagagagaatggtattcagaaagtaaagctctttgacgccgaatacgacactctcagagctttgggcaaatccggaatcgaagtcatggttggtattcccaatgagatgcttgcgactctcgcctctagcctgaaagctgctgagaaatgggttgctaaaaatgtctctactcacatctccaccgacaacgtcaacatcagatatgtggctgttgggaatgaacctttcttgtctacttataatgggagctatctgagtactactttccctgcgttgaggaacatccaaattgcaattataaaggctggccttcagaaccaagtgaaggtcacttgtcccttgaacgctgatgtctatgacagctccaccacttttccttctggaggggacttcagggccaatatccgtgacctcatgatcactatcgtcaagttcttgagcgaaaatggcggtcctttcactgttaacatctacccttacatcagtctttacaccaaccccgatttcccagttgattacgccttctttgacggcaatgcacagcccctgaacgatggtgggactttttattacaacatgtttgatgcaaattacgacaccctagtccacgcgttggagaagaatgggtttggtaacatgcctatcattattggggaaattggttggcctactgatggagacagtaatgcgaatttggactacgctaagaagttcaaccaaggctttatggctcacatctcaggggggaaagggactccgaggagacctggccctatcgatgcatacctgttcagcttgatagacgaggacgccaagagtgttcagccaggatactttgagcgacactgggggatattcacatttgacggcttaccaaaatatgccttgaacctagggacaacgaacacaggagctctgatccaggccaaaggggtacgctacctagagaggaagtggtgtgtgatgaagccaaatgtgaggttggatgatccgcaggtagctccagccgtgagctacgcgtgtagccttggggactgtactagtcttggggttgggacgtcctgtgctaatcttgacgggaaacaaaacatatcgtatgcattcaacagttattatcagatacaggatcagcttgatacagcttgtaagttcccaaacatatcagaggtgaccaagacagatccatctactggaacttgcagatttccgattatgatagaaccttactacggtggggcagcccgggaacacgggttctttttcccactactgatggtggcagccatcgcagtctctattttttgatggtttcttcttgtcaatttgtaattctgtgtgatggcttgaactatttttttttcttcttgaattctgatttctcttcctt

SEQ ID NO: 2753 - protein, 477 aa, Arabidopsis thaliana
  misc_feature (22)..(341): Pfam Name: Glyco_hydro_17 Pfam Description: Glycosyl hydrolases family 17
  misc_feature (361)..(445): Pfam Name: X8 Pfam Description: X8 domain
  misc_feature: Ceres Clone ID no. 1152436
  misc_feature: Bit score of 1302.9 for HMM based on sequences of Figure 30
  misc_feature: Functional Homolog Of SEQ ID NO. 2748
  misc_feature: in Figure 30
MGWGSVLLLLAVALLCQRASSIGANWGTQASHPLPPDIVVRMLRENGIQKVKLFDAEYDTLRALGKSGIEVMVGIPNEMLATLASSLKAAEKWVAKNVSTHISTDNVNIRYVAVGNEPFLSTYNGSYLSTTFPALRNIQIAIIKAGLQNQVKVTCPLNADVYDSSTTFPSGGDFRANIRDLMITIVKFLSENGGPFTVNIYPYISLYTNPDFPVDYAFFDGNAQPLNDGGTFYYNMFDANYDTLVHALEKNGFGNMPIIIGEIGWPTDGDSNANLDYAKKFNQGFMAHISGGKGTPRRPGPIDAYLFSLIDEDAKSVQPGYFERHWGIFTFDGLPKYALNLGTTNTGALIQAKGVRYLERKWCVMKPNVRLDDPQVAPAVSYACSLGDCTSLGVGTSCANLDGKQNISYAFNSYYQIQDQLDTACKFPNISEVTKTDPSTGTCRFPIMIEPYYGGAAREHGFFFPLLMVAAIAVSIF

SEQ ID NO: 2754 - protein, 483 aa, Vitis vinifera
  misc_feature (24)..(343): Pfam Name: Glyco_hydro_17 Pfam Description: Glycosyl hydrolases family 17
  misc_feature (363)..(447): Pfam Name: X8 Pfam Description: X8 domain
  misc_feature: Public GI ID no. 157353536
  misc_feature: Bit score of 1323.4 for HMM based on sequences of Figure 30
  misc_feature: Functional Homolog Of SEQ ID NO. 2748
  misc_feature: in Figure 30
MGWLSVAYGLVSVFSLVVHSVSGIGANWGTQATHPLPPETVVDLLRDNGIDKVKLFDADYGNLKALGKTRIEVMVGIPNEMLASLAGSVKSAEKWVAKNVSEHMTTNNVNIRYVAVGNEPFLETYNGSFLRTTFPALQNIQSALIKAGLGNQVKVTVPLNADVYASSSGLPSGGDFRTDIHDYMIPIVKFLMDNNAPFTVNIYPFISLYIDSNFPVEYAFFDGNASPINDGGTYYYNMFDANYDTLVWALEKNGFGNLPIIVGEIGWPTDGDQNANLDYAQRFNQGFMTHISGGKGTPKRAGPVDAYLFSLIDEDAKSIQPGSFERHWGVFYFDGSPKYQFNLGTTNSGSLIPARNVKHLEQKWCVMKPSAGLDDPQVAPSVQYACEKADCTSLGYQTSCGGLDARGNISYAFNSYYQTHNQLDTACQFPNVSKIVKTDPSTGTCIFRIGIQQYYGSADRKKGGLQSPLILVGHLILFLLTVL

SEQ ID NO: 2755 - DNA, 1449 bp, Populus balsamifera subsp. trichocarpa
  misc_feature: Ceres Annot ID no. 1482019
  misc_feature: Encodes the peptide sequence at SEQ ID NO. 2756
atgggtttgtatcatttggctattggattagtttccttgctttctatggtgagtggtgcgatgaccataggtgccaactggggaacacaagcatcccaccccttgcccccagaaactgtggtgaggctacttagggaaaatgggatccaaaaagttaaactttttgatgcagattatgatactctaaaagttctaggtaagactgggattgaggtcatggtgggtattccaaatgatttgcttgcttctctcgctggtagcatgaaggctgctgagaaatgggtttcaagaaatgtctccgcacatgtcaccaacaataatgtcaacatcagatatgttgcagttggaaatgaacctttcttgcagacgtacaatggaagctttctcagaacaaccttccctgctctccagaatgtccaatctgctctgataaaagctgggcttggcaatttaataaaggtcactgtccctctgaatgctgatgtctatgagagctcaagtggtcttccttctggtggtgacttccgagctgatatccatgatctcatgcttaccattgtaaaattcttgaatgatgccggtgccccctttactgtgaatatctatcctttcataagcctctatattgattccaacttcccggttgagtatgccttcttcgatggcaatgcaaatcctgtaaacgatggtggcacatcctattataacatgtttgatgctaactatgatacacttgtgaatgctctacaaaagaatgggtttgggaatctacctatcattgttggagagatcggatggccaactgatggagacagaaatgctaacgtagaatatgcccggcgtttcaaccaaggtttcatgtcacacattgcaagtgggaaaggaaccccaatgaggcctaatgccggtattaatgcctatttgttcagtttgattgatgaagatgctaaaagtattgatcctggaaacttcgaacggcattgggggatatttacatttgatggaatacccaaatacagtctcaaccttggcacaacaaacacaggagctttaattccagctagaagcgtccactacctggaaagaaaatggtgtgtgatgaagccgtcggccaagcttgatgacccacaagtggcaccaagtgtaagctatgcgtgtggactagcagactgtactagcctcggttatgggacatcatgtggaaatttggatcctagggagaacatatcatatgcattcaacagctacttccagatacaaaatcaactgggagatgcatgcaagtttccaaacctgtcgacaataaccaggacagatccatcaacttcaacttgcagatttgcgataatgatagagccatactatggtggcgtgggacagacattccggtatggcaagaaggtggccttgggtggtttgattgctctatttttcctaacgattgtgtaa

SEQ ID NO: 2756 - protein, 482 aa, Populus balsamifera subsp. trichocarpa
  misc_feature (23)..(343): Pfam Name: Glyco_hydro_17 Pfam Description: Glycosyl hydrolases family 17
  misc_feature (363)..(447): Pfam Name: X8 Pfam Description: X8 domain
  misc_feature: Ceres Annot ID no. 1482019
  misc_feature: Bit score of 1306.6 for HMM based on sequences of Figure 30
  misc_feature: Functional Homolog Of SEQ ID NO. 2748
  misc_feature: in Figure 30
MGLYHLAIGLVSLLSMVSGAMTIGANWGTQASHPLPPETVVRLLRENGIQKVKLFDADYDTLKVLGKTGIEVMVGIPNDLLASLAGSMKAAEKWVSRNVSAHVTNNNVNIRYVAVGNEPFLQTYNGSFLRTTFPALQNVQSALIKAGLGNLIKVTVPLNADVYESSSGLPSGGDFRADIHDLMLTIVKFLNDAGAPFTVNIYPFISLYIDSNFPVEYAFFDGNANPVNDGGTSYYNMFDANYDTLVNALQKNGFGNLPIIVGEIGWPTDGDRNANVEYARRFNQGFMSHIASGKGTPMRPNAGINAYLFSLIDEDAKSIDPGNFERHWGIFTFDGIPKYSLNLGTTNTGALIPARSVHYLERKWCVMKPSAKLDDPQVAPSVSYACGLADCTSLGYGTSCGNLDPRENISYAFNSYFQIQNQLGDACKFPNLSTITRTDPSTSTCRFAIMIEPYYGGVGQTFRYGKKVALGGLIALFFLTIV

SEQ ID NO: 2757 - DNA, 1596 bp, Glycine max
  misc_feature: Ceres Clone ID no. 651435
  misc_feature: Encodes the peptide sequence at SEQ ID NO. 2758
ctttgaggatcagattttggttcttgtaattataatgatggggggtgggaagtttagtagtttttttgttgtttttgtgttgttggtggggtcagggagtgggattggtgtgaattgggggacacagtcaacacaccctttgtcaccgtcgaaggtggtgaagatgctgaaggacaatggcattcagaaggtgaagctttttgatgctgatgctggtatcttggatgctctcaagaagtccggaatacaggtcatggttgggattccaaatgacatgctttatacgctggctaacagtgtggaagctgctgaaaaatgggtttccaagaatgtctcaaaacatgtctcttctggaggagtggacatcaggtacgttgcagtggggaatgaaccattcttgtcaacctacaacggttccttcgaagccacaactcttccagctctccaaaacatccaggcagctctcacaaaatccggtttgagcaatcgtgtcaaagtcactgtccccttaaatgccgatgtataccaaagctcatccgaaaagccatcggacggcggtttcagacctgacatcaacaatgtgatgctgcagattgtcaagttccttaacaacaacggagctcccttcacagtgaacatctatcctttcatcagcctctatgcagaccccaatttccctgttgactacgccttctttaacggctaccagcccgccataaacgacaacggaagaaactatgacaacgtgtttgatgccaaccatgacactctagtatgggcactgcagaagaatggcttcggaaacctgcctataattgtgggggaaatagggtggccaacagacggggaccgaaatgcaaaccttcaatatgcacaacgttttaaccaaggtttcatgtcacgttacatgtctggaaagggtaccccaatgaggcctggtcctatagatgcttatttgtttagtctcatagatgaagatgccaaaagcattcagccaggtaactttgagcgtcattggggcatgttttacttcgatgcacaacccaaataccaacttaaccttgggtcagcacgaggtaacgggctagtaggtgctagtggtgttgatcatttggctaaaaagtggtgtgttttgaaaccctcagcaaaccttaatgatgaccaacttgcacctagtgtggcctatgcttgtcaaaatgctgattgcactagtcttgggtatggaacttcttgtggcaatttagatgtgcatggtaacatttcttatgcttttaatagctactatcagataaatgaccagatggatagtgcatgcaaattccccagcctttccatgatcactgacaaggacccttctgtaggagattgcaagttcagaatcatgatccagacagattctgcggagctacatggaaaagttggatatctaacaacagtgctatgtttttttgtacttttgctattctgtaatccttggttttgatttggcttgcttttcgactcgtatcggatcaagtaaactttgtagcaactagcaaggtgtaagaaagaaaacgcgttacaatgttttatcactgcactaatgttgtctgtcgt

SEQ ID NO: 2758 - protein, 482 aa, Glycine max
  misc_feature (24)..(343): Pfam Name: Glyco_hydro_17 Pfam Description: Glycosyl hydrolases family 17
  misc_feature (363)..(447): Pfam Name: X8 Pfam Description: X8 domain
  misc_feature: Ceres Clone ID no. 651435
  misc_feature: Bit score of 1279.7 for HMM based on sequences of Figure 30
  misc_feature: Functional Homolog Of SEQ ID NO. 2748
  misc_feature: in Figure 30
MMGGGKFSSFFVVFVLLVGSGSGIGVNWGTQSTHPLSPSKVVKMLKDNGIQKVKLFDADAGILDALKKSGIQVMVGIPNDMLYTLANSVEAAEKWVSKNVSKHVSSGGVDIRYVAVGNEPFLSTYNGSFEATTLPALQNIQAALTKSGLSNRVKVTVPLNADVYQSSSEKPSDGGFRPDINNVMLQIVKFLNNNGAPFTVNIYPFISLYADPNFPVDYAFFNGYQPAINDNGRNYDNVFDANHDTLVWALQKNGFGNLPIIVGEIGWPTDGDRNANLQYAQRFNQGFMSRYMSGKGTPMRPGPIDAYLFSLIDEDAKSIQPGNFERHWGMFYFDAQPKYQLNLGSARGNGLVGASGVDHLAKKWCVLKPSANLNDDQLAPSVAYACQNADCTSLGYGTSCGNLDVHGNISYAFNSYYQINDQMDSACKFPSLSMITDKDPSVGDCKFRIMIQTDSAELHGKVGYLTTVLCFFVLLLFCNPWF

SEQ ID NO: 2759 - DNA, 1491 bp, Solanum lycopersicum
  misc_feature: Ceres Annot ID no. 8458215
  misc_feature: Encodes the peptide sequence at SEQ ID NO. 2760
atgaagtatttctacaacatcttcgtgttatggattttgttagttacgctggataaatgtttaaccacggagggtctaggcgtgaattgggggacgcgagcaagtcatccacttccacctgatattgtagtgaagttgttaaaagagaacggattcaataaagtaaagttgtttgaagcagatccaggagtgttgaaggcattgggtagatcaggtgttcaagttatggttgggatacctaatgacttgttagcaccattgtccgctagtgttcgaaatgctgaacaatgggtgcaacaaaatgtttcatcatttatttctaagaatggggtcgatatcaggtacgttgctgtgggaaatgagccttttttgaaagactacaaagacacattcgttaacacaacctatcctgccctccaaaatgttcaagcagctcttatcaaagcaggccttggtcgacaagtgaaggttacggttccaattaatgctgatgtgtatgaaacggacactggagtcccctccggtggaaattttagatcagacattcatggtctcatgatgaaaatcgtcaaattcctaagtgataacggaggtcctctcaccattaacatctacccgttccttagcctctacgcagatcctcatttcccaattgacttcgcatttttctcaggaacatcatctcctgttgtggatgggtccatatcatacactaatgtattcgaagctaattatgatactcttgtttgggctctagagaaaaatggattcgggtcattacctataattgttggagaaattggttggccaactgatggagattccaatgcaaatatcgagtatgctaagaagtttaatcaaggtctactagaccgaattagccgtggcataggtacccctaaacgtcctacgccaccagacatttaccttttcggcctcgtggatgaagacaccaagagcatccaaccaggtaatttcgagagacattggggagtgttttactatgatggagctatcaagtaccaactaaatttaggtaacaaccaaagtttgaaagcagcaaaaggcgttcgatatttagctaggaaatggtgtgtgatggctcctaatgctaatgttatggaccctaacttaccagatagtatcaactatgcttgtagttatgcagattgcacgagtcttggatatggttcatcatgtggtggattggatgttaagagcaatgcttcctacgcgtttaatatgtactaccaaacgatgaatcaacagaaggggtcgtgtgaaaggtttcacaatttatcggtcattacaacgattgatccatctccatcctcctctaattttggacgaacctcttctaattgtcgatttgagatcatgattgatgtggggaggcatgagacgagggtaaatccaggaacgtcttcggctacaaagatcaaacatttttctcttgttttattggtactagtattcatgttgcactactaa

SEQ ID NO: 2760 - protein, 496 aa, Solanum lycopersicum
  misc_feature (26)..(345): Pfam Name: Glyco_hydro_17 Pfam Description: Glycosyl hydrolases family 17
  misc_feature (363)..(457): Pfam Name: X8 Pfam Description: X8 domain
  misc_feature: Ceres Annot ID no. 8458215
  misc_feature: Bit score of 1240.5 for HMM based on sequences of Figure 30
  misc_feature: Functional Homolog Of SEQ ID NO. 2748
  misc_feature: in Figure 30
MKYFYNIFVLWILLVTLDKCLTTEGLGVNWGTRASHPLPPDIVVKLLKENGFNKVKLFEADPGVLKALGRSGVQVMVGIPNDLLAPLSASVRNAEQWVQQNVSSFISKNGVDIRYVAVGNEPFLKDYKDTFVNTTYPALQNVQAALIKAGLGRQVKVTVPINADVYETDTGVPSGGNFRSDIHGLMMKIVKFLSDNGGPLTINIYPFLSLYADPHFPIDFAFFSGTSSPVVDGSISYTNVFEANYDTLVWALEKNGFGSLPIIVGEIGWPTDGDSNANIEYAKKFNQGLLDRISRGIGTPKRPTPPDIYLFGLVDEDTKSIQPGNFERHWGVFYYDGAIKYQLNLGNNQSLKAAKGVRYLARKWCVMAPNANVMDPNLPDSINYACSYADCTSLGYGSSCGGLDVKSNASYAFNMYYQTMNQQKGSCERFHNLSVITTIDPSPSSSNFGRTSSNCRFEIMIDVGRHETRVNPGTSSATKIKHFSLVLLVLVFMLHY

SEQ ID NO: 2761 - DNA, 1700 bp, Arabidopsis thaliana
  misc_feature: Ceres Clone ID no. 114877
  misc_feature: Encodes the peptide sequence at SEQ ID NO. 2762
aagacacgaaaaagaattttaccgactggaagaagaaaaaacatcaaccagacaaaagaaaagaaaacaaaaacacatcttcgagatcaaacaaaccctaattatcatccatcgtcgccttctcaatatatattgccggaagagcagcgatgctcgttaacgtcgggacggttataatgaccgttttgaccctggctagtttggtcggaggcttcggtgtgaattggggcaatatcgcatcacatccgttgaatcccaacattgttgttcagatgcttaaggacaataagatcaataaagtgaagctttttgacgctgattcatggacgatgaatgctttggctggtacgggcatggaggttatggttggaatccctaataaccttcttgagtctctcgcagatgattacgataatgctaaagattgggttaaagaaaacgtgacccagtatattcgtaagggtggcgtcgacatcaagtamgtagccgtggggaacgagccgtttttgtctgcatacaacggatcgttcttgaagacaacatttccagcgttaaagaacattcacaaggcgttaaaagaagctggacacaccaatataatgaaagccacgatcccacaaaacgcagaagtttaccaatcagccaacgacaagccatcagaaggtgatttccgcaaggatgtcaaacaaacgatgcttgatatcgtcaatttcttccacgaaaacgacttacctttcaccgtcaacatttaccctttccttagtctttacctaaacgagcattttcccgttgagttcgcttttcttgacggtgatggtcagacaatgactgacaaaggaaagaattatgataacgtgtttgacgccaattacgacacacttgtttacgcgttgaagaaggctgggattcacgatatgaagattatcgttggagaggttggatggccaacggatggtcacaaatatgcatcgccgaagctagcggagaaattctatgcagggcttatgaaaagacttgctaaggacggtgggactccaacgaggcctgaaagattagaggtctatctcttcggtttcctcgacgaagacatgaagagtattcttccagggccttttgagagacattggggaatctttagatacgatgggacaccaaagtttatgctagatttcacgggacaaggacgccaaatggtgcccgttgcagctaaaggtgtgcagtacttggaaaaacaatggtgcgtagtgaacaaagacacggtcaatctagacgaagttggtcctgatctagactatgcgtgttaccacggggactgcaccgcgatggaagccgggtcaacttgtagtaagctaaccaaagtccaaaacatatcatacgcatttaacatgtatttccagatacaagaccaagacgttagggcttgcgatttcaaaggagctgcaatgatcaccaaggtcaatgcatccgtgggaagttgcttgttccctgttcagatcgttagtggaagtgatgatttcaggatcaactttgtgttcggaagattcgtcgtctttggacttgttcttcttggattgctcacggttatataatttgtttttctgttgttgtttggttttctttttgcaatttggagggatttattcgacacgattaattgttatttgttattcgttttaaaaatgtttactttgagttagttc

SEQ ID NO: 2762 - protein, 479 aa, Arabidopsis thaliana
  misc_feature (22)..(341): Pfam Name: Glyco_hydro_17 Pfam Description: Glycosyl hydrolases family 17
  misc_feature (362)..(445): Pfam Name: X8 Pfam Description: X8 domain
  misc_feature: Ceres Clone ID no. 114877
  misc_feature: Bit score of 717.5 for HMM based on sequences of Figure 30
  misc_feature: Functional Homolog Of SEQ ID NO. 2748
  misc_feature (111)..(111): Xaa is any aa, unknown, or other
MLVNVGTVIMTVLTLASLVGGFGVNWGNIASHPLNPNIVVQMLKDNKINKVKLFDADSWTMNALAGTGMEVMVGIPNNLLESLADDYDNAKDWVKENVTQYIRKGGVDIKXVAVGNEPFLSAYNGSFLKTTFPALKNIHKALKEAGHTNIMKATIPQNAEVYQSANDKPSEGDFRKDVKQTMLDIVNFFHENDLPFTVNIYPFLSLYLNEHFPVEFAFLDGDGQTMTDKGKNYDNVFDANYDTLVYALKKAGIHDMKIIVGEVGWPTDGHKYASPKLAEKFYAGLMKRLAKDGGTPTRPERLEVYLFGFLDEDMKSILPGPFERHWGIFRYDGTPKFMLDFTGQGRQMVPVAAKGVQYLEKQWCVVNKDTVNLDEVGPDLDYACYHGDCTAMEAGSTCSKLTKVQNISYAFNMYFQIQDQDVRACDFKGAAMITKVNASVGSCLFPVQIVSGSDDFRINFVFGRFVVFGLVLLGLLTVI

SEQ ID NO: 2763 - DNA, 1704 bp, Panicum virgatum
  misc_feature: Ceres Clone ID no. 2007431
  misc_feature: Encodes the peptide sequence at SEQ ID NO. 2764
cctggcgcttgaggaaactttggccgccccctcgggaggagctcttgcaattctagaggcttcgagaatttcaactttttttaggcttcgagagctcaagagttggatttctgaaaccattctagagagcaatccacctaaaccgtcctaagatttggagctggaataatccaccgatgggttccgggtccggccatggagcggcggcggtggccgtggcgctggtttcttggctgtgcttcgcttcagcgggcgtcggcgcgataggggcgaactggggcacgcagacgagccacccgctcccgccggacacggtggtgcggatgctcaaggacaacgggttccagaaggtgaagctgttcgacgccgaggagggcaccatgaacgccctcaagaagagcgggctggaggtgatggtcggcatccccaacgacatgctgctgacgatggcctccaacataaagtccgccgagaagtgggtgtacacgaacgtctccagctacctcaacgacggcgtcaacatccggtacgttgcagttgggaatgagccatttttggagacatacaatggaagctttctgcaaatcacttatcccgccatcagaaacattcaaagtgcacttataaaggctggtttgggcaatcaagttagagtcacatgccctctgaatgccgatgtctatgcatcaccaaccaccaagccttctgacggggacttccgcacagatattcatgatctgatgatcgctattgtaaaattgctcagcgacaatggtggagctttcactgtcaacatataccctttcataagcctctacattgatccaaatttccctgtggactatgccttctttgaaggggcctcgtcacccattgttgatggttccattacttacacaaacatgttcgatgcgaaccatgacacacttatatgggctctgaaaaagaatggctttggaaacctcccagtcattgttggggagatcggatggcctactgatggggacaggaacgctaatgctcagatggctcagcgcttcaaccaaggcttcatgactcatattgcctctggtcgaggaacgccgatgcggcctggacctgttgatgcttacttgttcagtctaattgacgaggacgagaagagcatccaaccaggaaattttgagcggcactggggtatctttacttatgacggatggccaaaataccaactgaatctcgggacagcaaattcaggcggccttgtgagagcaaagggcgtgaagtaccttgaaaagaagtggtgtgtactgaagccttcagtgcccctcaacgatccgaagatcgcagacaatgtgggttatgcatgttccatggcagactgtaccagccttggttataagacttcatgcgggatgctggacgaaagtggtaacatctcatatgcgttcaacaactactaccagaagaacgaccaagatgatgttgcctgtgggtttcaaaacctcgcgaccaccaccggccaagaccccagcactgggacatgcagatttggtatcatgatagaggtcgactctgccttctcattggggctgcagcggcttggaagcaacttcttcttgatgctcctgcttgtgcttctccagctatgcctgtcgttctcataaatgcttgttttctggagatgagcataaaagtataaacaatctgacagcttgaggatag

SEQ ID NO: 2764 - protein, 489 aa, Panicum virgatum
  misc_feature (30)..(348): Pfam Name: Glyco_hydro_17 Pfam Description: Glycosyl hydrolases family 17
  misc_feature (368)..(452): Pfam Name: X8 Pfam Description: X8 domain
  misc_feature: Ceres Clone ID no. 2007431
  misc_feature: Bit score of 1342.2 for HMM based on sequences of Figure 30
  misc_feature: Functional Homolog Of SEQ ID NO. 2748
MGSGSGHGAAAVAVALVSWLCFASAGVGAIGANWGTQTSHPLPPDTVVRMLKDNGFQKVKLFDAEEGTMNALKKSGLEVMVGIPNDMLLTMASNIKSAEKWVYTNVSSYLNDGVNIRYVAVGNEPFLETYNGSFLQITYPAIRNIQSALIKAGLGNQVRVTCPLNADVYASPTTKPSDGDFRTDIHDLMIAIVKLLSDNGGAFTVNIYPFISLYIDPNFPVDYAFFEGASSPIVDGSITYTNMFDANHDTLIWALKKNGFGNLPVIVGEIGWPTDGDRNANAQMAQRFNQGFMTHIASGRGTPMRPGPVDAYLFSLIDEDEKSIQPGNFERHWGIFTYDGWPKYQLNLGTANSGGLVRAKGVKYLEKKWCVLKPSVPLNDPKIADNVGYACSMADCTSLGYKTSCGMLDESGNISYAFNNYYQKNDQDDVACGFQNLATTTGQDPSTGTCRFGIMIEVDSAFSLGLQRLGSNFFLMLLLVLLQLCLSFS

SEQ ID NO: 2765 - DNA, 1420 bp, Panicum virgatum
  misc_feature: Ceres Clone ID no. 1875367
  misc_feature: Encodes the peptide sequence at SEQ ID NO. 2766
catgtgaaaacctctcttcctcctttcccgtgcttctgtctgtcacacggatcgggtgggtgacctcgagctggaggaaaccgtgtttcgtgtgctgccttggctcctccgtttccttggagcggcgtctcgccgtcctgtctattgaagcttcccttcgcgatcgattctcatcaatcttgcatctctcttcgccgcaaatttaaagctttctttgtttggacttgtggaagcaataaatctcgaagcttccttagtctgattggttgctgggagttcagagagctgttgagatcttcgcaggctccgatcggcgcgccgggatggcgaatctagccgcgctgcgcccgtatctctgcttgctggcggcaatggcgtcggcggcgtcgtggtccggcgtcgggacggtggacgcgctggggatgaactggggcacgcaggcgacgcaccccctgtcgcccaaggtcgtggtgcagatgctcaaggacaacggcatcaagaaggtgaagctgttcgacgccgaccaggccacgctcagcgtgctcgccggcagcggcatcgaggtcatggtcgccattcccaatgtcctgctcgacaggatcaccgactacgataccgccaaggagtgggtccggcacaatgtctcgcgctacaacttcgacggcggcgtcactatcaagtacgtggccgtgggcaacgagccgttcctggcggcgtacaacggcacgttcgacaaggtgaccttcccggcgctgcagaacatccagaacgcgctggacgaggccgggctcggcgacagcatcaaggccaccgtccccctcaacgccgacgtgtacatgtccccggcggacaacccggtgccgtcggcggggcggtggcggcccgacatcgcggacctgatgacgcagatggtgcagttcctgagcaaccacagcgcgcccttcaccgtcaacatctaccccttcatcagcctcttcctcaacgacaacttccccgtggacttcgccttcttcgacggcggcgcgacgcccgtggtggacaacggcgtctcctacaccaacgtgttcgacgccaacttcgacaccctggtggcggcgctcaaggcgtcggggcacggcgacatgcccatcgtcgtcggcgaggtcggctggcccaccgacggcgacaagcacgccaccaccgcgtacgcgcagcgcttctacagcggcctcctccggcggctcgccgccaacgccggcacccccgtccggcccaaccagtacatcgaggtctacctcttcggcctcctggacgaggacatcaagagcgtggcgccgggcaacttcgagcgccactggggcatcctccggtacgacgggcagcccaagttcccgatggatctgacggggcagggccagaacgcgatgctggtgccggcgcg

SEQ ID NO: 2766 - protein, 365 aa, Panicum virgatum
  misc_feature (32)..(353): Pfam Name: Glyco_hydro_17 Pfam Description: Glycosyl hydrolases family 17
  misc_feature (357)..(365): Pfam Name: X8 Pfam Description: X8 domain
  misc_feature: Ceres Clone ID no. 1875367
  misc_feature: Bit score of 432.5 for HMM based on sequences of Figure 30
  misc_feature: Functional Homolog Of SEQ ID NO. 2748
MANLAALRPYLCLLAAMASAASWSGVGTVDALGMNWGTQATHPLSPKVVVQMLKDNGIKKVKLFDADQATLSVLAGSGIEVMVAIPNVLLDRITDYDTAKEWVRHNVSRYNFDGGVTIKYVAVGNEPFLAAYNGTFDKVTFPALQNIQNALDEAGLGDSIKATVPLNADVYMSPADNPVPSAGRWRPDIADLMTQMVQFLSNHSAPFTVNIYPFISLFLNDNFPVDFAFFDGGATPVVDNGVSYTNVFDANFDTLVAALKASGHGDMPIVVGEVGWPTDGDKHATTAYAQRFYSGLLRRLAANAGTPVRPNQYIEVYLFGLLDEDIKSVAPGNFERHWGILRYDGQPKFPMDLTGQGQNAMLVPA

SEQ ID NO: 2767 - DNA, 1305 bp, Panicum virgatum
  misc_feature: Ceres Clone ID no. 1882421
  misc_feature: Encodes the peptide sequence at SEQ ID NO. 2768
aatacccgttgcccactccctccaatctctccatcacccaatttcgcgtcggcttcttcctcctacgccgcaagagagaaagccgaacgtctcttgaattcatacctgctcgcacgcgcgtgcacgtgcacagctggcagcgacagctacagcgccgtcttccatggcggcgagctaccggcaggccctgacccttgcggccgctctggtggcggcggcggtcgccgggctgccggcggcgggagcgctcggggtgaactggggcacgatagcgacgcaccggctgccgtcgggcatcgtggtgcggatgctggaggacaacggcatcaggaaggtgaagctgttcgacgccgaccccgggccgatggacgcgctcgccggcagcggcatcgaggtgatggtgggcatccccaacaacatgctggacatgatgacggactacggcacggccagggactgggtgaaccagaacgtcagccgctacaacttcgacggcggcgtgaacatcaaatacgtagccgttgggaatgagcctttcctgtcgtctttcaacggcacgttcctgaacgtgacgctgcccgccctgcagaacatccagcgcgcgctcaacgacgccggcctcggcgaaaccatcaaggccaccgtgccgctgaacgccgacgtgtacaactccccggcgagcaaccccgtcccgtctgccggccgcttccgcgccgacatcgccgacctcatgacggagatcgtgcagttcctcaaccagagcggcgcgcccttcaccgtcaacacctacccgttcctgagcctgtacggcaacgacggcttcccgctggactacgccttcttcgacggcacgagcagccccgtggtggacgccggcagcggcatccagtacacgaacgtgttcgacgccaacttcgacacgctcgtgtcggcgctcggcgcggcgggcgtcggcggcctccccgtcgtggtcggcgaggtcgggtggccgaccgacggcgacaagcacgccaccgcggcgtacgcgcagaagttctacgcggggctgctgcggaagctggcggccagggccggcacgccgctgcgccccaaccagtacatcgaggtgtacctgttcggcctcatcgacgaggacgccaagagcgtggcgccgggcaacttcgagcggcactggggcatcgtgcgctacgacggccagcccaagtacccgatggacctgtccggcgggcagggcgggaacgcggcggcgctggtggcggcgcgcggggtgcagtacctgccccggcagtggtgcttggtgaaccc

SEQ ID NO: 2768 - protein, 380 aa, Panicum virgatum
  misc_feature (29)..(352): Pfam Name: Glyco_hydro_17 Pfam Description: Glycosyl hydrolases family 17
  misc_feature (359)..(380): Pfam Name: X8 Pfam Description: X8 domain
  misc_feature: Ceres Clone ID no. 1882421
  misc_feature: Bit score of 482.0 for HMM based on sequences of Figure 30
  misc_feature: Functional Homolog Of SEQ ID NO. 2748
MAASYRQALTLAAALVAAAVAGLPAAGALGVNWGTIATHRLPSGIVVRMLEDNGIRKVKLFDADPGPMDALAGSGIEVMVGIPNNMLDMMTDYGTARDWVNQNVSRYNFDGGVNIKYVAVGNEPFLSSFNGTFLNVTLPALQNIQRALNDAGLGETIKATVPLNADVYNSPASNPVPSAGRFRADIADLMTEIVQFLNQSGAPFTVNTYPFLSLYGNDGFPLDYAFFDGTSSPVVDAGSGIQYTNVFDANFDTLVSALGAAGVGGLPVVVGEVGWPTDGDKHATAAYAQKFYAGLLRKLAARAGTPLRPNQYIEVYLFGLIDEDAKSVAPGNFERHWGIVRYDGQPKYPMDLSGGQGGNAAALVAARGVQYLPRQWCLVN

SEQ ID NO: 2769 - DNA, 1350 bp, Populus balsamifera subsp. trichocarpa
  misc_feature: Ceres Annot ID no. 1469752
  misc_feature: Encodes the peptide sequence at SEQ ID NO. 2770
atggctatacgtaaattgtcaccagaaacagttgttcaaatgttgaaggataatggcatcctaaaagtgaagctttttgatgcagaccaaactacaatgactgcgcttgctggttctggcattgaagttatggttgctattcctaatgatcagcttgctgtaatgggtgattataatcgtgctaaagattgggtcaagaggaatgtcactcgttataacttcaatggaggaattaccatcaagtatgtagcagttggtaatgagcctttcctcacatcctataatggttcattcttaaacaccaccttcccagcacttcggaacatacagaatgcccttaatgatgctggggtaggagactccataaaggccactgtacccttaaatgctgatgtctacggctcgccagatgaccaagcttatccatcttctggaagattccgcagtgatatcaatgacattatgacccagattgttcagtttttgagtcagaacggagcgcctttcactgtgaacatctatcctttcctaagtctttatgggaatgatgatttcccatttgattatgctttctttgatggggctcctcaacctgttgtagacaaaggtactgggattcagtacaccaacgtttttgatgccaactttgacaccttggtttcggccttgaaagcagcggggcatggggatatgcccattgtagtaggcgaggtaggctggcccacagatggggacaagaatgccaacataggttatgctactagattttacaatggacttataccacgacttgtaggcaatagaggcactccacttcggcctggctacattgaagtatacctgtttggtcttcttgacgaggatgccaagagcatcgctcctggaaattttgagcgccattgggggatctttcgttatgatgggcagccaaaatttcctctagatctttctggtcagaatcaaaacaagtttcttgcgggcgcgcggaatgtgcaatatcttccggctaaatggtgtatgtttaatccaaatgctaaggatcttagcaagcttgcagagaacatagattatgcttgctcacgttcagactgcactgcacttggatacggctcttcttgcaacagcttggactccaatgggaatgcttcatatgctttcaacatgtactaccaggtacaaaaccaggatgaattcgcctgtaattttgaaggcctggccacgcttaccaatcagaatatttcccaagggaattgcaatttcatcattcagatagtagcttcgtcctcctcctccctcaccctgtcattgatggcatttgtaacagtattattaacattcctgtttctatag

SEQ ID NO: 2770 - protein, 449 aa, Populus balsamifera subsp. trichocarpa
  misc_feature (1)..(316): Pfam Name: Glyco_hydro_17 Pfam Description: Glycosyl hydrolases family 17
  misc_feature (337)..(420): Pfam Name: X8 Pfam Description: X8 domain
  misc_feature: Ceres Annot ID no. 1469752
  misc_feature: Bit score of 730.0 for HMM based on sequences of Figure 30
  misc_feature: Functional Homolog Of SEQ ID NO. 2748
MAIRKLSPETVVQMLKDNGILKVKLFDADQTTMTALAGSGIEVMVAIPNDQLAVMGDYNRAKDWVKRNVTRYNFNGGITIKYVAVGNEPFLTSYNGSFLNTTFPALRNIQNALNDAGVGDSIKATVPLNADVYGSPDDQAYPSSGRFRSDINDIMTQIVQFLSQNGAPFTVNIYPFLSLYGNDDFPFDYAFFDGAPQPVVDKGTGIQYTNVFDANFDTLVSALKAAGHGDMPIVVGEVGWPTDGDKNANIGYATRFYNGLIPRLVGNRGTPLRPGYIEVYLFGLLDEDAKSIAPGNFERHWGIFRYDGQPKFPLDLSGQNQNKFLAGARNVQYLPAKWCMFNPNAKDLSKLAENIDYACSRSDCTALGYGSSCNSLDSNGNASYAFNMYYQVQNQDEFACNFEGLATLTNQNISQGNCNFIIQIVASSSSSLTLSLMAFVTVLLTFLFL

SEQ ID NO: 2771 - protein, 483 aa, Oryza sativa subsp. japonica
  misc_feature (33)..(349): Pfam Name: Glyco_hydro_17 Pfam Description: Glycosyl hydrolases family 17
  misc_feature (370)..(453): Pfam Name: X8 Pfam Description: X8 domain
  misc_feature: Public GI ID no. 115468738
  misc_feature: Bit score of 741.0 for HMM based on sequences of Figure 30
  misc_feature: Functional Homolog Of SEQ ID NO. 2748
MAPPPRLPAGAAALLLLLAVASRAAADGNAVDVGVNWGSQLSHPLLPKSVVQMLKENGILKVKLFDADPWPVGALVDSGIEVMLGIPNDMLETMNSYGNAQDWVKENVTSYGDKLKIKYVAVGNEPFLKAYNGSFMKTTFPALKNIQKALNEAGVGDKVKATVPLNADVYVSPDNKPSSGAFRPDIQGLMTDMVKFLHEHGSPFVVNIYPFLSLYQSDDFPFEFAFVDGGKTIQDKGGISYSNVFDANYDTLVTALKKAGVPSLKVVVGEVGWPTDGDKNANLKLARRYYDGLLKKLSKKEGTPLRPGKMDVYMFGLFDEDMKSILPGNFERHWGIFTYDGKPKFPMDLSGHGNDKPLAGVPGVEYLPKQWCVFDDGAEDKSKLPGNIQYACASGDCTALGYGCSCNGLDEKSNISYAFNMYFQMQDQDVRACDFDGLAKITTKNASARGCAFPIQIISAAAPAVAGVGLSAAALLALLMVLV

SEQ ID NO: 2772 - protein, 481 aa, Arabidopsis thaliana
  misc_feature (25)..(344): Pfam Name: Glyco_hydro_17 Pfam Description: Glycosyl hydrolases family 17
  misc_feature (365)..(448): Pfam Name: X8 Pfam Description: X8 domain
  misc_feature: Public GI ID no. 46518473
  misc_feature: Bit score of 751.2 for HMM based on sequences of Figure 30
  misc_feature: Functional Homolog Of SEQ ID NO. 2748
MSNLLALVVGFVIVIGHLGILVNGLGVNWGTMATHKLPPKTVVQMLKDNNINKVKLFDADETTMGALAGSGLEVMVAIPNDQLKVMTSYDRAKDLVRKNVTRYNFDGGVNITFVAVGNEPFLKSYNGSFINLTFPALANIQNALNEAGLGNSVKATVPLNADVYDSPASNPVPSAGRFRPDIIGQMTQIVDFLGKNNAPITINIYPFLSLYGNDDFPLNYAFFDGAEPINDNGIDYTNVFDANFDTLVSSLKAVGHGDMPIIVGEVGWPTEGDKHANAGSAYRFYNGLLPRLGTNKGTPLRPTYIEVYLFGLLDEDAKSIAPGPFERHWGIFKFDGQPKFPIDLSGQGQSKFLIGAQHVPYLPNKWCTFNPEAKDLTKLAANIDYACTFSDCTALGYGSSCNTLDANGNASYAFNMFFQVKNQDESACYFQGLATITTQNISQGQCNFPIQIVASSASSFSCSSYSLVVLIVWFLLSGMMF

SEQ ID NO: 2773 - protein, 478 aa, Arabidopsis thaliana
  misc_feature (21)..(340): Pfam Name: Glyco_hydro_17 Pfam Description: Glycosyl hydrolases family 17
  misc_feature (361)..(444): Pfam Name: X8 Pfam Description: X8 domain
  misc_feature: Public GI ID no. 15224778
  misc_feature: Bit score of 748.7 for HMM based on sequences of Figure 30
  misc_feature: Functional Homolog Of SEQ ID NO. 2748
MNLLAFVVGFGIMGIVMVDGLGVNWGTMATHKLPPKKVVQMLKDNNINKVKLFDADETTMSALSGSGLEVMVAIPNDQLKVMGSYDRAKDWVHKNVTRYNFNGGVNITFVAVGNEPFLKSYNGSFINLTFPALQNIQNALNEAGLGSSVKATVPLNADVYDSPSSNPVPSAGRFRPDIIGQMTQIVDFLGNNSAPITINIYPFLSLYGNDDFPLNYAFFDGAKPVDDNGIAYTNVFDANFDTLVSALKAVGHGDMPIIVGEVGWPTEGDKHANSGSAYRFYNGLLPRLGENRGTPLRPTYIEVYLFGLLDEDAKSIAPGEFERHWGIFKFDGQPKFPIDLSGQGQNKLLIGAENVTYQPKKWCMFNTEAKDLTKLAANIDYACTFSDCTALGYGSSCNTLDANGNASYAFNMYFQVKNQDEDACIFQGLATITTKNISQGQCNFPIQIVASTASSFSSSLVLLIAGVWFLLSGVMFEV

SEQ ID NO: 2774 - DNA, 2082 bp, Panicum virgatum
  misc_feature: Ceres Clone ID no. 1810424
  misc_feature: Encodes the peptide sequence at SEQ ID NO. 2775
gaacccgacgaggtgctctggtcgccagctcggattggccgctctgcctcctcatcctccttccagtcctccgccctcggttctcgcgccgcggcgtcccctgctccctcgattcaaaattctgaatcttttcccgtctcaattccgttccgtcgtcgtctcgctctcgtccctgcagttcttgacttcgagttacattacatacagcatcaaaggacttcagcttctctgagctggattgtgtggacatccccatccaggacatctcacctcaccggccttgattccagcagctccccgaccttcctttccttcccctcagttcttggagcccagctccgcgaaatccacccaaaattctagctattccttctccttctccaaggttgctgcgctcgccggattcaagccccgattccttccggtcctctccaggcggagcggcggctcgcattgcgctgatggcggggctcgccgcggcgctgctggtggcgctgtgctgggcggcggcgccgggggcggcggcgctggggatgaactggggcacgcaggcgtcgcacccgctgccgcccaaggcggtggtgcaggtgctccgggacaacggcatcaagaaggtgaagctcttcgacaccgacttcgccgccatgagcgcgctcgccggcagcggcatcgaggtcatggccgccatccccaacatcatgctcgccgacctcgccgccgacgccggcaaggccaaggactgggtcaagcgcaacgtcaagcgctacgacttcgacggcggcattaccatcaagtacgtggctgttggcaatgagccgttcttggcgtcatacaacggctcgttcatcaaagtcaccttcccggcgcttcagaacatccagaacgcgctcaacgacgccggcgtcggcgacaggatcaaagccaccgtcccgctaaacgccggcgtgtacaactccccggccagtaacccggtgccgtcggcgggccggttccgcaccgacatctcgggcctcatgacggacatcgtcaagttcctggccaagaacaacgcgcccttcaccgtcaacatctacccgttcctcagcctgtaccaaaacgacaacttcccgctcgactacgccttcttcgacggcggcgcgacgccggtgaacgacaacggcgtgctgtacaccaacgtgttcgacgccaacttcgacacgctggtggcggcgctcaaggccgtcgggaacggcgacatgcccatcatcgtcggcgaggtcggctggcccaccgacggcgacaagcacgccaaggcgtcctacgcggggcgcttctacgccgggctgctcaagcggctggccgcgaacacgggcacgccggcgcggctgaaccagtacatcgaggtctacctgttcgggctcgtcgacgaggacgcgaagagcgtggcgccgggcaacttcgagcggcactggggcatcctccggtacgacgggcagcccaagtacccgatggacctcgccgggcagggccggaacacgatgctggtgccggcgaaggggatcaagtacctgcccaagacatggtgcgcgctgaaccccaacgccagggacctcggcaagctcggcgccaacatcgactacgcgtgcacgttcgccgactgcacgccgctgggctacggctcgacgtgcaacggcatggacaccgccggcaacgcctcgtacgcgttcaacgcctactaccaggtgcagaaccagaaggacgacgcctgcgacttccagggcctcgcgctgcccaccgagaaggacccgtccacggcgacctgcaacttcaccatacagatccaggccggggcagcagccgcggaggcgctgcgcggccggagcgccggcgcggcggccggggtgctcttggcgttgctgcagctcctggcgctgtggtagtgctagtagctgccgctgccgcgagcagtggtagttttgtgattacgtgcccggttgtttttgttgcaatttcttttttatgtcttttggactggatttagatgcatgtattctaggatgcaatggatgtggttaattgattggatgttttcaccggctgttc

SEQ ID NO: 2775 - protein, 485 aa, Panicum virgatum
  misc_feature (23)..(345): Pfam Name: Glyco_hydro_17 Pfam Description: Glycosyl hydrolases family 17
  misc_feature (366)..(449): Pfam Name: X8 Pfam Description: X8 domain
  misc_feature: Ceres Clone ID no. 1810424
  misc_feature: Bit score of 810.0 for HMM based on sequences of Figure 30
  misc_feature: Functional Homolog Of SEQ ID NO. 2748
MAGLAAALLVALCWAAAPGAAALGMNWGTQASHPLPPKAVVQVLRDNGIKKVKLFDTDFAAMSALAGSGIEVMAAIPNIMLADLAADAGKAKDWVKRNVKRYDFDGGITIKYVAVGNEPFLASYNGSFIKVTFPALQNIQNALNDAGVGDRIKATVPLNAGVYNSPASNPVPSAGRFRTDISGLMTDIVKFLAKNNAPFTVNIYPFLSLYQNDNFPLDYAFFDGGATPVNDNGVLYTNVFDANFDTLVAALKAVGNGDMPIIVGEVGWPTDGDKHAKASYAGRFYAGLLKRLAANTGTPARLNQYIEVYLFGLVDEDAKSVAPGNFERHWGILRYDGQPKYPMDLAGQGRNTMLVPAKGIKYLPKTWCALNPNARDLGKLGANIDYACTFADCTPLGYGSTCNGMDTAGNASYAFNAYYQVQNQKDDACDFQGLALPTEKDPSTATCNFTIQIQAGAAAAEALRGRSAGAAAGVLLALLQLLALW

SEQ ID NO: 2776 - DNA, 1800 bp, Zea mays
  misc_feature: Ceres Clone ID no. 1559140
  misc_feature: Encodes the peptide sequence at SEQ ID NO. 2777
tccccattgtccactccctccaaatccccgctgcgtcggccacacctcttcctcttacgcgttacacatcttcctcttcctctaaaattaacccagcgtctcgaccctgcgaattcatacgcgcgcgcgcgcgcgtgtgcacgtgcgcaggcgcggctggtagcctgcagacaccgacacgtagcagcggcgtcccgtcttccatcttccatggcggcggcgagctatgatcggctggccgtcgcggcgtccgctgtggtggtggcggcggtggcgctggcggtcgctgggctgcccgcggctggagcgctcggggtgaactggggcacgatggcgacgcaccagctgccgacggccaccgtggtgcggatgctggaggacaacggcatcaggaaggtgaagcttttcgacgccgacgccggccccatggacgcgctcgccggcaccagcgtggaggtcatggtggccatccccaacaacatgctcgacatgatgacggactacggcacggccagggactgggtgcgccagaacgtcagccgctataacttcgacggcggcgtgaacatcaagtacgtagcggtcggaaacgagcccttcctgtcgtctttcaacggcacgttcctgaacgtcacgctccccgccctgcagaacatccagcgcgctctgaacgacgccggcttcggcgacaccatcaaggcgacggtgccgctgaacgccgacgtgtacaactcgcccaaggacaacctagtgccgtcggcggggcggttccggcccgacatcgccggcctcatgacggagatcgtgcagttcctgaaccagagcggcgcgcccttcaccgtcaacatctacccgttcctgagcctctacgacaacgacgacttcccgctggactacgccttcttcgacggcacgggcagccccgtcgtggacaacggcatccagtacaccaacgtgttcgacgccaacttcgacacgctcgtgtccgcgctggccgcggcgggcgtcggcggcctccccgtcgtggtcggcgaggtcgggtggccgaccgacggcgacaagcacgccacggccgcgttcgcgcagaagttctacgcgggcctgctgcggaagctggcggccagcgccggcacgccgctgcgcccgggccagtacatcgaggtctacctgttcagcctcatcgacgaggacgccaagagcgtggcgccgggcaacttcgagcgccactggggcatcatgcgctacgacggccagcccaagtacgccatggacctgtctgggcagggccggaacacggcgctcgtggcggcgcggggggtccagtacctgccccgccagtggtgcgtcgtcaaccccaacgcgcaggacacgagcaagatcggcgacagcgtcacctacgcctgcaccttctccgactgcacctcgctcggctacggctcctcgtgcaacggcctggacgccgccggcaacgcgtcctacgccttcaacatgtacttccaggtgcagaaccaggtggagggcagctgctacttccagggcctcgccgtgcccacggcgcagaacccgtccacggacgcctgcaacttcaccatacagatcactccgtcggcagcggggagacgacgcgccgccgccgcgacagctctgctcctcgtggttcttcttactgccgtgcatgtcgcgccatgactgagcccgtgactcggctcatgttgttaccaattattaggacttagaaaagaaagacacttttctaaattttcggaagacatcatgggaatttagaagcccgatgtttat

SEQ ID NO: 2777 - protein, 492 aa, Zea mays
  misc_feature (34)..(355): Pfam Name: Glyco_hydro_17 Pfam Description: Glycosyl hydrolases family 17
  misc_feature (376)..(459): Pfam Name: X8 Pfam Description: X8 domain
  misc_feature: Ceres Clone ID no. 1559140
  misc_feature: Bit score of 811.4 for HMM based on sequences of Figure 30
  misc_feature: Functional Homolog Of SEQ ID NO. 2748
MAAASYDRLAVAASAVVVAAVALAVAGLPAAGALGVNWGTMATHQLPTATVVRMLEDNGIRKVKLFDADAGPMDALAGTSVEVMVAIPNNMLDMMTDYGTARDWVRQNVSRYNFDGGVNIKYVAVGNEPFLSSFNGTFLNVTLPALQNIQRALNDAGFGDTIKATVPLNADVYNSPKDNLVPSAGRFRPDIAGLMTEIVQFLNQSGAPFTVNIYPFLSLYDNDDFPLDYAFFDGTGSPVVDNGIQYTNVFDANFDTLVSALAAAGVGGLPVVVGEVGWPTDGDKHATAAFAQKFYAGLLRKLAASAGTPLRPGQYIEVYLFSLIDEDAKSVAPGNFERHWGIMRYDGQPKYAMDLSGQGRNTALVAARGVQYLPRQWCVVNPNAQDTSKIGDSVTYACTFSDCTSLGYGSSCNGLDAAGNASYAFNMYFQVQNQVEGSCYFQGLAVPTAQNPSTDACNFTIQITPSAAGRRRAAAATALLLVVLLTAVHVAP

SEQ ID NO: 2778 - protein, 477 aa, Arabidopsis thaliana
  misc_feature (22)..(341): Pfam Name: Glyco_hydro_17 Pfam Description: Glycosyl hydrolases family 17
  misc_feature (361)..(445): Pfam Name: X8 Pfam Description: X8 domain
  misc_feature: Public GI ID no. 16604491
  misc_feature: Bit score of 1298.0 for HMM based on sequences of Figure 30
  misc_feature: Functional Homolog Of SEQ ID NO. 2748
MGWGSVLLLLAVALLCQRASSIGANWGTQASHPLPPDIVVRMLRENGIQKVKLFDAEYDTLRALGKSGIEVMVGIPNEMLATLASSLKAAEKWVAKNVSTHISTDNVNIRYVAVGNEPFLSTYNGSYLSTTFPALRNIQIAIIKAGLQNQVKVTCPLNADVYDSSTTFPSGGDFRANIRDLMITIVKFLSENGGPFTVNIYPYISLYTNPDFPVDYAFLDGNAQPLNDGGTFYYNMFDANYDTLVHALEKNGFGNMPIIIGEIGWPTDGDSNANLDYAKKFNQGFMAHISGGKGTPRRPGPIDAYLFSLIDEDAKSVQPGYFERHWGIFTFDGLPKYALNLGTTNTGALIQAKGVRYLERKWCVMKPNVRLDDPQVAPAVSYACSLGDCTSLGVGTSCANLDGKQNISYAFNSYYQIQDQLDTACKFPNISEVTKTDPSTGTCRFPIMIEPYYGGAAREHGFFFPLLMVAAIAVSIF

SEQ ID NO: 2779 - DNA, 2300 bp, Panicum virgatum
  misc_feature: Ceres Clone ID no. 1795733
  misc_feature: Encodes the peptide sequence at SEQ ID NO. 2780
ctcctccctcgttctcctccgggttttgctctccccttcctcttccacctgcagctgacctgtctgcctttgcttcctcccgcgacctccttccttccaccgcaccctccctcgttctcctccgggtagggagggcacctggggcatcagatcagaccctacccggggacctattaatgccccggtcgtgacagatgcccgctgttcttggcaccggtggcagcctcgctctctgaaccttttgcttgcccctgctcctgcaaacaccctgctccgggaagaacgaaccccgtgccgccggtcctgaactcggtttgattcggagcacccggtgttttgttcgttctgcaaaagagatttccttcccttttttcagagtctccagccagtttcaggagttccttcattgcaaggctttcctctgttctctcgctcgcctgcctttttcagagccgttttagtcattgattttgttcgagctgcggattcttggctgctctttgattgattcttgaccacgaaacaagctcgtcgaattccatatagattcagctgatcaatcaagtttaatcacgccagtcatatcccaagcgaaatcttctacttcccggcctgctgctctggccagttcctctcctgagcagtgatcacccacccggcgcagcggttcttgatcgccgtccatggcggcggcggcggcggctgtgcgcgccgcggcggtggcggtgctgtcagtggcggtgctgtgcggcgcggcgcaggcgatcggcgtgaactggggcacgcagctgagccacccgctgccggcgagcacggtggtgcggctgctgcaggacaacggcttcgacaaggtgaagctgttcgacgccgaggacgccatcctcggcgcgctcaagggctcgggcatccaggtcatggtcggcatccccaacgacatgctcgccgacctcgccgccggcggcaaggccgccgaggactgggtcgccaagaacgtctccggccacgtccgcgacggcgtcgacatcaggtacgtggccgtgggtaacgagccgttcctggagacgttcaacgggacgtacctgaatacgacgttcccggcgatgcagaacatccaggcggcgctggtgaaggccggccttgccgacaaggtgaaggtgacggtgccgctgaacgccgacgtgtaccagtcgccgacggggaagccgtcggacggcgacttccgcggcgacatccacggcctgatgctcaccatcgtgcagttcctggcgtccacgggcgcgccgttcgtggccaacgtgtacccgttcatcagcctgtacacggaccccaacttcccgctggactacgccttcttccagggctcgtcgtcgccggtggtcgacggcggcgtcacctaccagaacaccttcgacgccaaccacgacacgctggtggcggcgctccgccggaacgggttcggcaacgtgtcggtggtggtcggcgaggtcgggtggccgacggacggcgacgccaacgccaacctcgactacgcgcggcgcttcaaccaggggttcctcgcccacatcgccggcggccagggcacgccgctgcggccgggccccgtcgacgcctacctcttcagcctcatcgacgaggaccgcaagagcatccagccgggcaacttcgagcgccactggggcatcttcaactacgacggcacgcccaagtacgcgctcagcctcgccggcggcggcaacggctcggctgcgctgacgctcaagccggcgaggggcgtccagtacctggagaagcggtggtgcgtgctcaagccgtcggcggacctcgccgatcagaaggtcggcgacagcgtcggctacgcgtgcgggctcgccgactgcacggcgctcgggtacaagacctcctgcggcggcctcgacgccaggggcaacgtttcctacgccttcaacagctactaccagaccatggaccaggacgaccgcgcctgcgacttcaggggcctcgccgccgccacctccgtcgaccccacggcggggacgtgccgcttcatcgtccagatcgacgtcggcgccgccgcggctatcagctccgccaggggcgtcgccggaggcgtggccagctccgcgctcgccgcgctcgtgctcatgtcgtccatgttgctctgatgagactgaagcgtttccaaatagaccgtaccgtccatgcgcattgtttgtctttaattagcttctgatgagaggattcttgacgcatgtactaactagtgttgtttattttggttggataaatctttcttttatttc

SEQ ID NO: 2780 - protein, 492 aa, Panicum virgatum
  misc_feature (28)..(346): Pfam Name: Glyco_hydro_17 Pfam Description: Glycosyl hydrolases family 17
  misc_feature (370)..(454): Pfam Name: X8 Pfam Description: X8 domain
  misc_feature: Ceres Clone ID no. 1795733
  misc_feature: Bit score of 1047.7 for HMM based on sequences of Figure 30
  misc_feature: Functional Homolog Of SEQ ID NO. 2748
MAAAAAAVRAAAVAVLSVAVLCGAAQAIGVNWGTQLSHPLPASTVVRLLQDNGFDKVKLFDAEDAILGALKGSGIQVMVGIPNDMLADLAAGGKAAEDWVAKNVSGHVRDGVDIRYVAVGNEPFLETFNGTYLNTTFPAMQNIQAALVKAGLADKVKVTVPLNADVYQSPTGKPSDGDFRGDIHGLMLTIVQFLASTGAPFVANVYPFISLYTDPNFPLDYAFFQGSSSPVVDGGVTYQNTFDANHDTLVAALRRNGFGNVSVVVGEVGWPTDGDANANLDYARRFNQGFLAHIAGGQGTPLRPGPVDAYLFSLIDEDRKSIQPGNFERHWGIFNYDGTPKYALSLAGGGNGSAALTLKPARGVQYLEKRWCVLKPSADLADQKVGDSVGYACGLADCTALGYKTSCGGLDARGNVSYAFNSYYQTMDQDDRACDFRGLAAATSVDPTAGTCRFIVQIDVGAAAAISSARGVAGGVASSALAALVLMSSMLL

SEQ ID NO: 2781 - protein, 494 aa, Oryza sativa subsp. japonica
  misc_feature (29)..(347): Pfam Name: Glyco_hydro_17 Pfam Description: Glycosyl hydrolases family 17
  misc_feature (372)..(456): Pfam Name: X8 Pfam Description: X8 domain
  misc_feature: Public GI ID no. 115475361
  misc_feature: Bit score of 1034.2 for HMM based on sequences of Figure 30
  misc_feature: Functional Homolog Of SEQ ID NO. 2748
MAPAPLAGGRLVLVVVVAAACMARWSEGIGVNWGTQLSHPLPASTVVQLLKDNGFDRVKLFDAEDGILAALKGSGIQVMVGIPNDMLADLAAGAKAADDWVATNVSNHVNNGVDIRYVAVGNEPFLETFNGTYLNTTFPAMQSVQAALKKAGLADKVKVTVPLNADVYQSPTGKPSDGDFRADIHGLMLTIVQFLADTGAPFVANVYPFISLYKDPNFPLDYAFFQGSSAPVVDGGVTYQNTFDANHDTLVAALRRNGYPNVSIIVGEVGWPTDGDANANPQYARQFNQGFLTHIASGQGTPLRPGPVDAYLFSLIDEDQKSIEPGNFERHWGVFYYDGQPKYPLSLRGGGNGNGNGSTLMPAKGVTYLQRRWCVMKPSASLVDQKVGDGVSYACGLADCTSLGYKTSCGGLDAKGNVSYAFNSYYQVNDQDDRACDFKGIATTTTVDPSAGSCRFIIEIAPTANGVAMAATVRVAGVMAAILAVFIHLVVPVF

SEQ ID NO: 2782 - protein, 494 aa, Oryza sativa subsp. indica
  misc_feature (29)..(347): Pfam Name: Glyco_hydro_17 Pfam Description: Glycosyl hydrolases family 17
  misc_feature (372)..(456): Pfam Name: X8 Pfam Description: X8 domain
  misc_feature: Public GI ID no. 125560593
  misc_feature: Bit score of 1034.5 for HMM based on sequences of Figure 30
  misc_feature: Functional Homolog Of SEQ ID NO. 2748
MAPAPLAGGRLVVVVVVAAACMARWSEGIGVNWGTQLSHPLPASTVVQLLKDNGFDRVKLFDAEDGILAALKGSGIQVMVGIPNDMLADLAAGAKAADDWVATNVSNHVNNGVDIRYVAVGNEPFLETFNGTYLNTTFPAMQSVQAALKKAGLADKVKVTVPLNADVYQSPTGKPSDGDFRADIHGLMLTIVQFLADTGAPFVANVYPFISLYKDPNFPLDYAFFQGSSAPVVDGGMTYQNTFDANHDTLVAALRRNGYPNVSIIVGEVGWPTDGDTNANPQYARQFNQGFLTHIASGQGTPLRPGPVDAYLFSLIDEDQKSIEPGNFERHWGVFYYDGQPKYPLSLRGGDNGNGNGSTLMPAKGVTYLQRRWCVMKPSASLADQKVGDGVSYACGLADCTSLGYKTSCGGLDAKGNVSYAFNSYYQVNDQDDRACDFKGIATTTTVDPSAGSCRFIIEIAPTANGVAMAATVRVTGVMAAILAAFIHLVVPVF

SEQ ID NO: 2783 - DNA, 1452 bp, Populus balsamifera subsp. trichocarpa
  misc_feature: Ceres Annot ID no. 1507103
  misc_feature: Encodes the peptide sequence at SEQ ID NO. 2784
atgcggttgtatcatgtggctattggattagtgtcattgctttcaacggtgagtggtgcaatgaccataggtgccaactggggaacgcaagctacccaccctttggatccatccattgtggtgaggctgcttagggaaaatgggatccaaaaggttaagctttttgatgcagattatgatactctaaaagctcttggtaagagtgggattgaggtcatggtgggtatcccaaatgacatgcttgctactctggctagtagcatgaaggctgctgagaaatgggtttccaaaaatgtctccgcacatgtcacctcaaataatgtcaacatcagatatgttgcagttggaaatgaacctttcttgcaaacgtacaatggaagctttctcagaacaacattccctgctctccagaatgtccaatctgctctgataaaagctgggcttggcaattcagtaaaggtcactgtccctctgaatgctgatgtctatgagagctcaagtggacttccttctgatggtgactttcgagctgatatccatgatctcatgcttgccattgtcaaattcttgaatgatgccactgcccccttcactgtgaatatctatcctttcataagcctgtactctgatgctgacttcccggttgattatgccttcttcgatggcaatgcaaatcctgtaaatgatggcggcacatcctactataacatgtttgatgctaactatgatactcttgtgcatgctctacaaaagaatggatttgggaatttgcctatcattgttggagagatcgggtggccaactgatggggacaggaatgctaacatagaatatgcccagcgtttcaaccaaggtttcatgtcacatatttccagtgggaaagggactccattaaagcctaatgctgatattaatgcctatttgtttagtctgattgatgaggatgccaaaagtgttgatcctgggaacttcgaacggcactggggggtatttacatttgatggaatgcccaaatatgctttcaaccttggcacaacaaatacaggagctttaattccagcaagaagagtcaactacctggagcgtaaatggtgtgtgatgaagccatcggccaagcttgatgacccacaagtgccactaagtgtaagctatgcctgcggactagctgactgcactaggcttggttatgggacatcatgtgcaagtttggattctagggggaacatttcatatgcatttaacagttatttccagatacaaaatcaacttgacgatgcatgcaagtttccaaacctttcaacaatcaccaagacagatccatctactggaacttgcaaatttgaggtaatgattgagccatactatggaggtgcggtacaggcacccgggcatgccaagaaggcactgggtttggttgtaggtctcattctatttttcctaaagattgtgtaa

SEQ ID NO: 2784 - protein, 483 aa, Populus balsamifera subsp. trichocarpa
  misc_feature (23)..(343): Pfam Name: Glyco_hydro_17 Pfam Description: Glycosyl hydrolases family 17
  misc_feature (363)..(447): Pfam Name: X8 Pfam Description: X8 domain
  misc_feature: Ceres Annot ID no. 1507103
  misc_feature: Bit score of 1258.7 for HMM based on sequences of Figure 30
  misc_feature: Functional Homolog Of SEQ ID NO. 2748
MRLYHVAIGLVSLLSTVSGAMTIGANWGTQATHPLDPSIVVRLLRENGIQKVKLFDADYDTLKALGKSGIEVMVGIPNDMLATLASSMKAAEKWVSKNVSAHVTSNNVNIRYVAVGNEPFLQTYNGSFLRTTFPALQNVQSALIKAGLGNSVKVTVPLNADVYESSSGLPSDGDFRADIHDLMLAIVKFLNDATAPFTVNIYPFISLYSDADFPVDYAFFDGNANPVNDGGTSYYNMFDANYDTLVHALQKNGFGNLPIIVGEIGWPTDGDRNANIEYAQRFNQGFMSHISSGKGTPLKPNADINAYLFSLIDEDAKSVDPGNFERHWGVFTFDGMPKYAFNLGTTNTGALIPARRVNYLERKWCVMKPSAKLDDPQVPLSVSYACGLADCTRLGYGTSCASLDSRGNISYAFNSYFQIQNQLDDACKFPNLSTITKTDPSTGTCKFEVMIEPYYGGAVQAPGHAKKALGLVVGLILFFLKIV

SEQ ID NO: 2785 - DNA, 1473 bp, Populus balsamifera subsp. trichocarpa
  misc_feature: Ceres Annot ID no. 1453959
  misc_feature: Encodes the peptide sequence at SEQ ID NO. 2786
atgcggttgtatcatgtggctattggattagtgtcattgctttcaacggtgagtggtgcaatgaccataggtgccaactggggaacgcaagctacccaccctttggatccatccattgtggtgaggctgcttagggaaaatgggatccaaaaggttaagctttttgatgcagattatgatactctaaaagctcttggtaagagtgggattgaggtcatggtgggtatcccaaatgacatgcttgctactctggctagtagcatgaaggctgctgagaaatgggtttccaaaaatgtctccgcacatgtcacctcaaataatgtcaacatcagccaagagacaacccgatcaagatatgttgcagttggaaatgaacctttcttgcaaacgtacaatggaagctttctcagaacaacattccctgctctccagaatgtccaatctgctctgataaaagctgggcttggcaattcagtaaaggtcactgtccctctgaatgctgatgtctatgagagctcaagtggacttccttctgatggtgactttcgagctgatatccatgatctcatgcttgccattgtcaaattcttgaatgatgccactgcccccttcactgtgaatatctatcctttcataagcctgtactctgatgctgacttcccggttgattatgccttcttcgatggcaatgcaaatcctgtaaatgatggcggcacatcctactataacatgtttgatgctaactatgatactcttgtgcatgctctacaaaagaatggatttgggaatttgcctatcattgttggagagatcgggtggccaactgatggggacaggaatgctaacatagaatatgcccagcgtttcaaccaaggtttcatgtcacatatttccagtgggaaagggactccattaaagcctaatgctgatattaatgcctatttgtttagtctgattgatgaggatgccaaaagtgttgatcctgggaacttcgaacggcactggggggtatttacatttgatggaatgcccaaatatgctttcaaccttggcacaacaaatacaggagctttaattccagcaagaagagtcaactacctggagcgtaaatggtgtgtgatgaagccatcggccaagcttgatgacccacaagtgccactaagtgtaagctatgcctgcggactagctgactgcactaggcttggttatgggacatcatgtgcaagtttggattctagggggaacatttcatatgcatttaacagttatttccagatacaaaatcaacttgacgatgcatgcaagtttccaaacctttcaacaatcaccaagacagatccatctactggaacttgcaaatttgaggtaatgattgagccatactatggaggtgcggtacaggcacccgggcatgccaagaaggcactgggtttggttgtaggtctcattctatttttcctaaagattgtgtaa

SEQ ID NO: 2786 - protein, 490 aa, Populus balsamifera subsp. trichocarpa
  misc_feature (23)..(350): Pfam Name: Glyco_hydro_17 Pfam Description: Glycosyl hydrolases family 17
  misc_feature (370)..(454): Pfam Name: X8 Pfam Description: X8 domain
  misc_feature: Ceres Annot ID no. 1453959
  misc_feature: Bit score of 1247.2 for HMM based on sequences of Figure 30
  misc_feature: Functional Homolog Of SEQ ID NO. 2748
MRLYHVAIGLVSLLSTVSGAMTIGANWGTQATHPLDPSIVVRLLRENGIQKVKLFDADYDTLKALGKSGIEVMVGIPNDMLATLASSMKAAEKWVSKNVSAHVTSNNVNISQETTRSRYVAVGNEPFLQTYNGSFLRTTFPALQNVQSALIKAGLGNSVKVTVPLNADVYESSSGLPSDGDFRADIHDLMLAIVKFLNDATAPFTVNIYPFISLYSDADFPVDYAFFDGNANPVNDGGTSYYNMFDANYDTLVHALQKNGFGNLPIIVGEIGWPTDGDRNANIEYAQRFNQGFMSHISSGKGTPLKPNADINAYLFSLIDEDAKSVDPGNFERHWGVFTFDGMPKYAFNLGTTNTGALIPARRVNYLERKWCVMKPSAKLDDPQVPLSVSYACGLADCTRLGYGTSCASLDSRGNISYAFNSYFQIQNQLDDACKFPNLSTITKTDPSTGTCKFEVMIEPYYGGAVQAPGHAKKALGLVVGLILFFLKIV

SEQ ID NO: 2787 - DNA, 1551 bp, Populus balsamifera subsp. trichocarpa
  misc_feature: Ceres Annot ID no. 1480967
  misc_feature: Encodes the peptide sequence at SEQ ID NO. 2788
atggggggtttgatcaaaggagtggtgtctacaaggcaaaggcaacaaccccttgttgtaaccctgcgctgcttatctatccttcaattgctggtggattccgtgagtggaattggagtcaactggggaactcaggcaacgcatcctttgccgccttccactgtggttaaaatgctcagggacaacggttttcagaaggtcaagctatttgatgctgattcagcaactctaaatgctctcgctaattctgggattcaaatcatggtgggtattcccaatgatatgctttataatctggccaatagtgagcaagctgctgacacctgggtggccaagaatgtctcttctcatatctcttctggtggtgcagacatcaggtacgttgcagttggaaatgagccattcttgtcatcctacaatggaagctttctgggaacaactcttcctgctcttcggaatatccaatcagctttaacaaaagccggactaagcactcgggtgaaagtcaccgttcccctcaatgctgatgtgtatgagagtccaacaaatcttccatccgatggtgacttccgttcagacatccatgatctcatgctatcgattgtcaagttcttgagcgacaatggggctccattcactgtcaatatctatccatttataagcctttacagtgatcctaatttcccccttggctttgcattcttcggcaacaagtcatttcccttgaacgatggtgggacaatttacgacaatgtgtttgatgcgaaccatgacacccttatatgggctttgcagaagaatggttatggaagcttgcccgttgtcattggggaaattgggtggcctaccgacggagacaaaaacgcaaacttgaactacgcacagcagttcaaccaagggtttatggatagtgtcatttccaacaagggaaccccactgcgtcctggttatgtggatgcctatttatttagtctcatagacgaagatgccaaaagcattcagcctggtaattttgagcgccactggggattgttttacttggatggacagcctaagtatgcagttagcctggtgacggcaaattcaaagggtctggtaccggcaagggatgtacattatttagccagacaatggtgtattatgtctccatcagcaagccttgatgatccgcaggtgggaccgagtgtgagctatgcttgtgctaacgcggactgtactagtctagggtatggaacttcttgtgaaaatctggatgcgcggggcaacatctcctatgcatttaacagttactaccagcagaataatcaacttgaaagtgcttgtaagttcccaaataacctttcagttgttataaacaatgacccctctactgggacctgcaaattcaggatcatgattcaaggtcaagcagtcatctctggcgcgggaggtggaaagggattttcaaggtctagtttggtagtgttcatcttagtgttttttcccctgtatttttgtgattttctgggtttaaagcttaaggtgtatggtctagggttttgtgatttttaa

SEQ ID NO: 2788 - protein, 516 aa, Populus balsamifera subsp. trichocarpa
  misc_feature (38)..(357): Pfam Name: Glyco_hydro_17 Pfam Description: Glycosyl hydrolases family 17
  misc_feature (377)..(462): Pfam Name: X8 Pfam Description: X8 domain
  misc_feature: Ceres Annot ID no. 1480967
  misc_feature: Bit score of 1092.2 for HMM based on sequences of Figure 30
  misc_feature: Functional Homolog Of SEQ ID NO. 2748
MGGLIKGVVSTRQRQQPLVVTLRCLSILQLLVDSVSGIGVNWGTQATHPLPPSTVVKMLRDNGFQKVKLFDADSATLNALANSGIQIMVGIPNDMLYNLANSEQAADTWVAKNVSSHISSGGADIRYVAVGNEPFLSSYNGSFLGTTLPALRNIQSALTKAGLSTRVKVTVPLNADVYESPTNLPSDGDFRSDIHDLMLSIVKFLSDNGAPFTVNIYPFISLYSDPNFPLGFAFFGNKSFPLNDGGTIYDNVFDANHDTLIWALQKNGYGSLPVVIGEIGWPTDGDKNANLNYAQQFNQGFMDSVISNKGTPLRPGYVDAYLFSLIDEDAKSIQPGNFERHWGLFYLDGQPKYAVSLVTANSKGLVPARDVHYLARQWCIMSPSASLDDPQVGPSVSYACANADCTSLGYGTSCENLDARGNISYAFNSYYQQNNQLESACKFPNNLSVVINNDPSTGTCKFRIMIQGQAVISGAGGGKGFSRSSLVVFILVFFPLYFCDFLGLKLKVYGLGFCDF

SEQ ID NO: 2789 - DNA, 1530 bp, Populus balsamifera subsp. trichocarpa
  misc_feature: Ceres Annot ID no. 1476972
  misc_feature: Encodes the peptide sequence at SEQ ID NO. 2790
atgggtttggtcaaaggagtggcgctgtctacaaggctaaggcaacaacctcttggtctagccttgtgctgcctatatattcttcaactactgctgctgttgctgagttccgtaagtggtactggagtaaactggggaacacaggcaacacatcctctgccgccttccacggtggttaacatgctcagagacaacggtattcagaaggttaagctatttgatgctgattcagctactctaaatgcttttgctaattctgggattcaaatcatggtgggcatccccaatgatatgctctatactctggctaatagtgaacaagctgctgagaattgggtggccaagaatgtctcttcccatatctcttctggtggtgtagacatcagtaattttgagctatttataaggtacgttgcagttggaaatgagccgttcttgtcaacatacaatggaagctttctgggaacaactcttcctgctcttcaaaatatccattcagctttaacgaaagccggactagacactcgggtgaaagtcaccgttcccctcaatgctgatgtatatgagagtcccacaaatatcccgtccgatggtaacttccgcaaagacatccaagatctcatgctgtcgattgtcaagttcttgagcgacaatggggctcccttcactgtcaatatctatccctttataagcctttacactactcctaatttccccctaggctttgcattctttaacaacactagttcatcttccttgactgatggtggaaaaatctacgacaatgtgttcgatgcgaatcatgacacccttgtatgggccttgcagaaaaatggatatggaaacttgtccattgtcattggggagattggatggcctaccgatggagacaaaaatgcaaacttgaactatgcacagcagttcaaccaagggtttatgaataatgtcattgccggtaagggaaccccaatgcgtcctgctcctgtggatgcctatttgtttagtctcttcgacgaggatgccaaaagcattcagcctggtaattttgagcgacactggggattattttacttggatgggcagcctaagtatgcacttagcctggggacgacgaattcgaatggtctggtaccagcaaggggtgtgagctatttagctaaaaaatggtgtattatgtctccatcagcaagcctagacgatccgcaggtggcaccaagtgtgagttatgcttgtgctagtgcagactgtactagtctgggctatgggacttcttgtggagatttaagtgcacagggcaacatctcctacgcatttaacagttactaccagcagaacaatcaacttgaaagtgcttgtaggttcccaaataatctttcagttgttacaagtaatgacccatctaccgggacttgcaaattcatgatcatgattcaaagtcaagcagtcacatctggtgttgaaggtggaagagggttttcaatgtctagttttgtaacgtttgccgtcgcgtttctttcagcgtttttgtga

SEQ ID NO: 2790 - protein, 509 aa, Populus balsamifera subsp. trichocarpa
  misc_feature (41)..(368): Pfam Name: Glyco_hydro_17 Pfam Description: Glycosyl hydrolases family 17
  misc_feature (388)..(473): Pfam Name: X8 Pfam Description: X8 domain
  misc_feature: Ceres Annot ID no. 1476972
  misc_feature: Bit score of 1073.2 for HMM based on sequences of Figure 30
  misc_feature: Functional Homolog Of SEQ ID NO. 2748
MGLVKGVALSTRLRQQPLGLALCCLYILQLLLLLLSSVSGTGVNWGTQATHPLPPSTVVNMLRDNGIQKVKLFDADSATLNAFANSGIQIMVGIPNDMLYTLANSEQAAENWVAKNVSSHISSGGVDISNFELFIRYVAVGNEPFLSTYNGSFLGTTLPALQNIHSALTKAGLDTRVKVTVPLNADVYESPTNIPSDGNFRKDIQDLMLSIVKFLSDNGAPFTVNIYPFISLYTTPNFPLGFAFFNNTSSSSLTDGGKIYDNVFDANHDTLVWALQKNGYGNLSIVIGEIGWPTDGDKNANLNYAQQFNQGFMNNVIAGKGTPMRPAPVDAYLFSLFDEDAKSIQPGNFERHWGLFYLDGQPKYALSLGTTNSNGLVPARGVSYLAKKWCIMSPSASLDDPQVAPSVSYACASADCTSLGYGTSCGDLSAQGNISYAFNSYYQQNNQLESACRFPNNLSVVTSNDPSTGTCKFMIMIQSQAVTSGVEGGRGFSMSSFVTFAVAFLSAFL

SEQ ID NO: 2791 - protein, 484 aa, Arabidopsis thaliana
  misc_feature (27)..(346): Pfam Name: Glyco_hydro_17 Pfam Description: Glycosyl hydrolases family 17
  misc_feature (364)..(448): Pfam Name: X8 Pfam Description: X8 domain
  misc_feature: Public GI ID no. 15235840
  misc_feature: Bit score of 1094.8 for HMM based on sequences of Figure 30
  misc_feature: Functional Homolog Of SEQ ID NO. 2748
MLFKGVFAVFFVITLLYASLLIEVEGIGVNWGSQARHPLPPATVVRLLRENGIQKVKLFEADSAILKALSRTGIQVMVGIPNDLLAPLAGSVAAAERWVSQNVSAHVSSNGVDIRYVAVGNEPFLKAFNGTFEGITLPALQNIQSAIIKAGLATQVKVTVPLNADVYQSASNLPSDGDFRPEIRDLMLNIVKFLSDNGAPFTINIYPFISLYNDPNFPVEFAFFDGTGTPINDNGRIYDNVLDANYDTLVWSLQKNGFGNLTIIVGEVGWPTDGDKNANLMYARRYNQGFMNRQKANKGTPMRPGAMDAYLFGLIDEDAKSIQPGNFERHWGIFYIDGQPKYQLSLGSGNGLIPAKDVHYLAKKWCILAPNANLQDPQLGPSVSYACDHADCTSLGYGSSCGNLNLAQNVSYAFNSYYQVSNQLDSACKFPGLSIVSTRDPSVGSCKFKIMIKSEDASEASAMMPITRSTAVLLLLSICLYIVL

SEQ ID NO: 2792 - protein, 487 aa, Vitis vinifera
  misc_feature (25)..(344): Pfam Name: Glyco_hydro_17 Pfam Description: Glycosyl hydrolases family 17
  misc_feature (362)..(446): Pfam Name: X8 Pfam Description: X8 domain
  misc_feature: Public GI ID no. 157342450
  misc_feature: Bit score of 1079.8 for HMM based on sequences of Figure 30
  misc_feature: Functional Homolog Of SEQ ID NO. 2748
MALSYLVWMLLLSLVGGLGVEGVGLACNWGTISTHPLPPDITVKLLKDNGFNKVKLFEAQPGVLRALGNSGIQVMLGIPNDFLAPLASSVGFAVKWVSQNVSTYVSKYGVDIRYVAVGNEPFLKTYKDSFLQTTFPALKNIQAALIKAGLGEKVRVTVPLNADVYQTDSGLPSGGDFRSDIHALMISIIKFLSDNDGPLTINIYPFLSLYADPHFPVDYAFFSGNSTPIVDGSISYTNVFEANYDTLIWALEKNGFPSIPVIIGEVGWPTDGDSNANLQYAKKFNQGLVNRILRGQGTPKRSDAPDIYLFGLLDEDAKSIQPGNFERHWGIFYFDGTVKYSLDLGKNKTLVPAKGVRYLERRWCVMAPEANIADPNLTESINYACTYADCTSLGYGSSCSRLDTRSNASYAFNMYYQTMNHQKDSCKFSNLSVITSINPSQGTCRFEVMIDVGKHDTRATSSSAGGLQNLAIRVIFVLILIIYGGVC

SEQ ID NO: 2793 - DNA, 1479 bp, Populus balsamifera subsp. trichocarpa
  misc_feature: Ceres Annot ID no. 1455089
  misc_feature: Encodes the peptide sequence at SEQ ID NO. 2794
atgggtcgtcgtcaatacttgctatgcttcttcttcttgtgcctaattagcagtgatcaaggtctagtcaagggagtcgtagggctggcatgtaactgggggactcagtccactcacccacttcaggctaacatagcggtcaagcttttgaaagaaaatggttttaagaaggtgaagctgtttgaggctgatcctgctgcactcaaggcactagggaagtctggtatccaagttatggttgggataccaaatgagtttctagcacccctagcaagtagtgttcaggttgctataaactgggtccaacaaaatgtatccagctatatatccagatatgggactgatattaggtatgtagctgtgggaaatgaacctttcctccagaccttcaaagacactttccttaacacaacatttccagcacttcaaaatattcaagcagccttgataaaagctggattagggaggcaagtaaaggtcacggtaccattaaatgcagatgtgtaccagacagacagtggcctaccttctggtggcaacttccgatcagatatccatggcctcatgatctctatcatcaagtttctcagtgacaataatgctccccttaccattaatatctacccattcctcagcctttatgctgacccccatttcccggtcgactatgccttcttcaacggcacctctgccccagttgtcgatggttccatatcttacaccaatgtctttgaggccaactttgacaccctcatttcagctcttgaaaagaacggtttctcatcaatgcctgtcattgttggtgaggttggatggccaacagatggtgaccgcaatgcaaatatggactatgctcgccggttcaatcaagcccttgtcgatcgtataaatcaaggccaaggcaccccaaaacgtaaaactccaccagatatctacctattcgcactcacagacgaggatgcgaagagtgtccgacctggaaatttcgaaaggcactggggtatcttctattatgatggagccatcaagtaccaaatggatatgggtaatggtaaacctcttgttccagcgaaaggtgtaagatatttggcgaggcagtggtgtgtaatgtcacctgaagccagcatttctgaccccaacttgcctaacagcattgcctatgcctgcaattatgcagactgcacaagtctgggatatggatcttcctgcggtacgctagatgctaaaagcaatgcatcttatgcttttaacatgtactatcagaccgtggatcaaaggaatggtgcgtgttctttttctaatttatcaacccttacaaaagttgatccatctcaaaatccttgtcgatttgagatcatgatggatctaggaaagcacgagacacctcctagacgttcatttgcaggaggaaaggaaaatccggcagcaatgatggctttcatatcggcgctgatattgatcatttgtggtgcttactga

SEQ ID NO: 2794 - protein, 492 aa, Populus balsamifera subsp. trichocarpa
  misc_feature (29)..(348): Pfam Name: Glyco_hydro_17 Pfam Description: Glycosyl hydrolases family 17
  misc_feature (366)..(450): Pfam Name: X8 Pfam Description: X8 domain
  misc_feature: Ceres Annot ID no. 1455089
  misc_feature: Bit score of 1043.8 for HMM based on sequences of Figure 30
  misc_feature: Functional Homolog Of SEQ ID NO. 2748
MGRRQYLLCFFFLCLISSDQGLVKGVVGLACNWGTQSTHPLQANIAVKLLKENGFKKVKLFEADPAALKALGKSGIQVMVGIPNEFLAPLASSVQVAINWVQQNVSSYISRYGTDIRYVAVGNEPFLQTFKDTFLNTTFPALQNIQAALIKAGLGRQVKVTVPLNADVYQTDSGLPSGGNFRSDIHGLMISIIKFLSDNNAPLTINIYPFLSLYADPHFPVDYAFFNGTSAPVVDGSISYTNVFEANFDTLISALEKNGFSSMPVIVGEVGWPTDGDRNANMDYARRFNQALVDRINQGQGTPKRKTPPDIYLFALTDEDAKSVRPGNFERHWGIFYYDGAIKYQMDMGNGKPLVPAKGVRYLARQWCVMSPEASISDPNLPNSIAYACNYADCTSLGYGSSCGTLDAKSNASYAFNMYYQTVDQRNGACSFSNLSTLTKVDPSQNPCRFEIMMDLGKHETPPRRSFAGGKENPAAMMAFISALILIICGAY

SEQ ID NO: 2795 - DNA, 1812 bp, Zea mays
  misc_feature: Ceres Clone ID no. 1581235
  misc_feature: Encodes the peptide sequence at SEQ ID NO. 2796
gcacataacaatagcatactgcgacagggcagcacatacggtggtgtgccagtgatccatcaagaagctaagccatggcggcggcgctgcgggcgctggcggtgctgctgtgggtggcggcggcgtaccctgtggtgttccgggcgcggcccgtgcaggcgctggcggccaactggggcacccgcgcgctgcacccgctgccgggggacatcaccgtacgcctcctgcgggacaacggcttcgacaaggtgaagctgttcgaggcggacccgccggcgctcagggcgctgggtcactcagggatccaggtcatgctgggcctccccaacgagctgctgggctccgtggccgccagcgtgaccgccgccgagcagtgggtgatccagaacgtctccacctacgtctccaagtacggcgtggacatccgctacgtggccgtcggcaacgagccgttcctcaagtcgtacaagggcaagttcgaggccgccacgctgcccgccgtgcagaacgtgcaggccgcgctcgtcaaggcgggcctcgccaggcaggtgcacgtcaccgtcccgctcaacgccgacgtctacgagtccggcgacggccgcccttcctcgggcgacttcaggcccgacatcgccggcctcatggtcagcctcgtccgcttcctcctcgacaacggcggcgtgctcaccatcaacatctacccattcctctccctgtacgccgaccccaacttccccgtcgactacgcctacttcccgtcccccggcgcgcgcccctcgcaggccagcgtgcaggacggcaacgtgctctacaccaacgtcttcgacgccaactacgacaccctcatcgccgcgctcgagaagcacggcctcggcgccatccccgtcatcgtcggggagatcggctggcccaccgacggcgacaagaacgccaacgccgccaacgcgcagcgcttcaaccagggcctcttcgaccgcatcatcgccggcaagggcaccccgcggcgcccgcagatgcccgacgtctacgtcttcgcgctgctggacgaggacaacaagagcatcgacccgggcagcttcgagcgccactggggcgtcttcaactacgacggctcgcccaagtacccgctcaggctcgccagcggcagggcgatcgtgccggccaagggcgtccgctacctctccaagcagtggtgcgtgctccgcccggacgccagcgcctccgacccggccatcgccggcgccgtcggctacgcctgcgagtactccgactgcaccagcctcggcgccggctcctcctgcggcagcgtcgatgcgcgcgccaacgtctcctacgccttcaaccagttcttccagtcggccaaccagcagaaggccgcctgcaaatttaacaacctctccgttatcaccaccaccgacccgtcccaggggacctgccgcttcgagatcatgatcgacaccggccgccacgagctcaccggaaagccggcgtcgcccgccgccagggcgggtccttcagcttcatcttggagcgccgtgctgctgctcggcttggctggccttactgctctggttgcctggtaagcgtgagactgcgacacggagtagctaagctagaaaggcaggccacaggttcttcaaatttttttccaactaaacgctacgctggtgataaatatgcatttgccgttgggattattggcgaaggggattctttctcatgtacatatacacgacagagatgttgatatgtaatttggttgggatatggttcggatttcagaggatatacacatatgacgaaatgtcttcg

SEQ ID NO: 2796 - protein, 502 aa, Zea mays
  misc_feature (30)..(354): Pfam Name: Glyco_hydro_17 Pfam Description: Glycosyl hydrolases family 17
  misc_feature (372)..(456): Pfam Name: X8 Pfam Description: X8 domain
  misc_feature: Ceres Clone ID no. 1581235
  misc_feature: Bit score of 943.5 for HMM based on sequences of Figure 30
  misc_feature: Functional Homolog Of SEQ ID NO. 2748
MAAALRALAVLLWVAAAYPVVFRARPVQALAANWGTRALHPLPGDITVRLLRDNGFDKVKLFEADPPALRALGHSGIQVMLGLPNELLGSVAASVTAAEQWVIQNVSTYVSKYGVDIRYVAVGNEPFLKSYKGKFEAATLPAVQNVQAALVKAGLARQVHVTVPLNADVYESGDGRPSSGDFRPDIAGLMVSLVRFLLDNGGVLTINIYPFLSLYADPNFPVDYAYFPSPGARPSQASVQDGNVLYTNVFDANYDTLIAALEKHGLGAIPVIVGEIGWPTDGDKNANAANAQRFNQGLFDRIIAGKGTPRRPQMPDVYVFALLDEDNKSIDPGSFERHWGVFNYDGSPKYPLRLASGRAIVPAKGVRYLSKQWCVLRPDASASDPAIAGAVGYACEYSDCTSLGAGSSCGSVDARANVSYAFNQFFQSANQQKAACKFNNLSVITTTDPSQGTCRFEIMIDTGRHELTGKPASPAARAGPSASSWSAVLLLGLAGLTALVAW

SEQ ID NO: 2797 - protein, 477 aa, Picea sitchensis
  misc_feature (20)..(336): Pfam Name: Glyco_hydro_17 Pfam Description: Glycosyl hydrolases family 17
  misc_feature (357)..(442): Pfam Name: X8 Pfam Description: X8 domain
  misc_feature: Public GI ID no. 116789946
  misc_feature: Bit score of 882.7 for HMM based on sequences of Figure 30
  misc_feature: Functional Homolog Of SEQ ID NO. 2748
MVFLFWVLVMFVLVGWVQGLGVNWGTMATHPLSPDIVVQMLKDNGITKVKLFDAEEHTMKALANTGIQVMVGIPNDQLQMIATSTKDAANWVETNVTEFNLDGSVDIRFVAVGNEPFLESYNGTFIQYTFPALQNIQNALNKAGLSNIKATVPLNADVYEGVVPSEGQFRTDINDLMIQICQFLASNGAPFTVNIYPFLSLYSNENFPVDFAFFDGTGQPLIDGNVQYTNVFDAALDTLFWALKKSGFPNLPVLVGEVGWPTDGDKHGNINFAQRFNQGLLKNIMSGLGTPMRFKAAETYLFSLVDEDAKSIAPGNFERHWGIFQYDGTPKYALDLSGQAQNKALVSAKGVKYLPRRWCVINLSASSTALTQLSDSITYACTHGDCTSLGYGSSCNSLNYQGNASYAFNAYYQANNQQNGDCVFSGLAVVTQTDPSQGACKFEIQIAVSATSKAMNSCIYSLISVAGVAAVVLLSFL

SEQ ID NO: 2798 - DNA, 1911 bp, Triticum aestivum
  misc_feature: Ceres Clone ID no. 790682
  misc_feature: Encodes the peptide sequence at SEQ ID NO. 2799
aatatatatatctatctatctcctggttgcaacagcacggccaactcacacgtacgtacataaaacgtacgggcatctagctagctagctagtatatccatcgttatggggtggtcgtcgacgtcggcgccggcgccggcggtgctgctgctgtggctgctcgccctagcattcagggcggacgcgctggcggccaactggggcacgcgcgcgctgcacccgctccccggcgacgtcaccgtgcagctgctcaaggacaacggcttcgacaaggtgaagctcttcgaggccgacccggccgcgctcaaggcgctgggccactccggcatccaggtcatgctcggcctccccaacgacctgctcgccaccgtcgcccgggacgtcgccgccgccgagcagtgggtgcagcacaacgtctcccactacgtctccgactacggcgtcgacatccggttcgtggccgtgggcaacgagccgttcctcaagtcgtacaagggccagttcgaggcggccacgctcccggctgtgcgcaacgtgcaggcggcgctcgtcaaggccggcctggcgcgccaggtgcgcgtcaccgtgccgctcaacgccgacgtctacgagtcgctcgacggccgtccctcctccggcgacttccgcgccgacatcacgggcctcatgaccagcctcgtccgcttcctgctcgacagcggcggggtgctcgccatcaacatctacccgttcctctccatggacgccgacgccaacttcccgcgcgactacgccttcttccctgcccccggcgcgccgccctcccaggccagcgtgcaggacggcaacgtgctctacaccaacgtcttcgacgccaactacgacaccctcgtcgccgcgctcgagaagcacggcctcgggaacatcaccgtcgtggtgggcgagatcggctggcccaccgacggcgacgccaacgccaacgtggccgacgcgcgcaagttcaaccagggcctcttcgaccgcatcgtcgccggcaagggcaccccgcgcaggccccagatgcccgacgtctacgtcttcgcgctgctagacgaggacgccaagagcgtcgaccccggcaacttcgagcgccactggggcgtcttcaactacgacggctcgcccaagtacgcgctccgcctcgccggcggaaagggcatcgtgccggccaagggcgtcaggtacctctccaagcagtggtgcgtgctccgccccgacgccagccccaccgacccggctatcgtcggcgccgtcgggtacgcgtgccagtacgccgactgcaccagcctcagccccggctcctcctgcggcggcctcgacgttaggggcaacgtctcctacgccttcaaccagttcttccagtccgccagccagcagaagggctcctgcggcttcaacaacctctccgtggtcaccaccaccgacccgtcgcagggcacctgccgcttcaagatcatgatcgacaccggccggcacgacctcacccaccaggactccggcgcagccagggccgccgccgcgtggggcgccgtcgttgccgtgctcgcattgctcgccattgtggcactctgaccctccctctgccattgacgaggacacgcgcgctcaccacctcagtggctagctagcctagcctagagaggaaggatcaaacaattcttttactttttttcttttctttatacatgggctgtcaagctccctcagcaagcaaggattagaattgtacagtatattcgtatatgaacatgtagtgcaacgctcagagcatcggattaggagtgttgcacaaagatcctccatcctcctcatctatatctatctatatacatatctatatctatatctatctatacctatacctacctactaataaaggaagatgcgtttctc

SEQ ID NO: 2799 - protein, 494 aa, Triticum aestivum
  misc_feature (28)..(352): Pfam Name: Glyco_hydro_17 Pfam Description: Glycosyl hydrolases family 17
  misc_feature (370)..(454): Pfam Name: X8 Pfam Description: X8 domain
  misc_feature: Ceres Clone ID no. 790682
  misc_feature: Bit score of 917.8 for HMM based on sequences of Figure 30
  misc_feature: Functional Homolog Of SEQ ID NO. 2748
MGWSSTSAPAPAVLLLWLLALAFRADALAANWGTRALHPLPGDVTVQLLKDNGFDKVKLFEADPAALKALGHSGIQVMLGLPNDLLATVARDVAAAEQWVQHNVSHYVSDYGVDIRFVAVGNEPFLKSYKGQFEAATLPAVRNVQAALVKAGLARQVRVTVPLNADVYESLDGRPSSGDFRADITGLMTSLVRFLLDSGGVLAINIYPFLSMDADANFPRDYAFFPAPGAPPSQASVQDGNVLYTNVFDANYDTLVAALEKHGLGNITVVVGEIGWPTDGDANANVADARKFNQGLFDRIVAGKGTPRRPQMPDVYVFALLDEDAKSVDPGNFERHWGVFNYDGSPKYALRLAGGKGIVPAKGVRYLSKQWCVLRPDASPTDPAIVGAVGYACQYADCTSLSPGSSCGGLDVRGNVSYAFNQFFQSASQQKGSCGFNNLSVVTTTDPSQGTCRFKIMIDTGRHDLTHQDSGAARAAAAWGAVVAVLALLAIVAL

SEQ ID NO: 2800 - DNA, 1848 bp, Gossypium hirsutum
  misc_feature: Ceres Clone ID no. 1926644
  misc_feature: Encodes the peptide sequence at SEQ ID NO. 2801
aattgacggtttctatcagagaaatatacaataaagagaagaagaagaagaaaacataataaactttctcatattttatattcttttttgcttcttttttcggttttctcttagctttcagtttcatttattagattcactttttgcttctcgctctctctctctctctctttctctctcctatggtcacaagaatttctttgattttcttttgatccagcagataaacagcctttttctttttaacattattacataaccccatagccaagaccttgcttcttctttctaagcaagcacctttaagccttaaccttcatccccttttatttgttcctttcaagatttttcattaaaaaggctaaagagaaagcatgggaaattctttttttttaggaatattggtaacaatatccctgtgccttcagttgtttggtggtggtgcttatggtcttggtgtgaattggggtaccatggcatcacataaacttccccccaaaacagtggttcagatgttaaaagacaatggaataaagaaagttaagctttttgatgcagattcaactactatgaatgctcttgcaggaagtgatatcgaagtcatggttgctattcctaatgatcaacttcttgccatgaacagctataaacgtgctaaagattgggttaggaggaatgtcacaagatataatttcgatggaggtgttaacatcaagtatgtagctgttggcaacgagccgtttctcacaacttacaacggctcgttcataaacatcacgttccctgcgcttgaaaatattcaaaatgcacttaacgaagctggggttggggactcgataaaggcaaccatgccttcaaatgcagatgtctacaactcaccagaaagcaaccctgttccatcagctggtcggtttcggcctgatatcagtggacttatgacacagattgttgaatttctagccaagaacggtgcacctttcaccataaacatctaccctttcctcagtctctatggaaatgatgacttcccctttaactatgctttctttgatggaggaaacccgattgttgataacgggattcagtacacgaacgttttcgatgccaactttgacacattggtttcatctttgagagctatagggcatggggacatgaccattattgttggggaggtcggttggcccacagacggagacaagaatgccaatatagctaatgctcagagattttacaacgggctcatgcctagacttgcaggcaacgtcggcacacctttgcggccaggatatttagaagtgtacttatttggccttctagatgaagatgtaaagagtgttgctccgggaaactttgagcggcattggggaatctataggtatgacgggcagcctaaattcccactcgatctttcaggccagaatcagaaccggttcctcatccctgctcagaatgtcgaatatcttcctcagaaatggtgcgtgttcaatccaaatgctaatgacctgagcaaacttgcagacaacataaactatgcctgcaccttctccgattgcacagcacttggctacggatcttcatgtaacatcctggatgcgaatgggaacgcatcctacgcatttaacatgtactaccaggtgcaaaaccaggatgacatggcctgtaattttcaaggtctagccacggttataacacacagtccttcacaagggacttgcaattttatcattcaaattgcatcttcttcttttgctattggtccctcactgataggaatgacattttttgctgtaatagcaactgtattgctgtaaacttgattctgtagataactgggatgttgctctc

SEQ ID NO: 2801 - protein, 479 aa, Gossypium hirsutum
  misc_feature (27)..(346): Pfam Name: Glyco_hydro_17 Pfam Description: Glycosyl hydrolases family 17
  misc_feature (367)..(450): Pfam Name: X8 Pfam Description: X8 domain
  misc_feature: Ceres Clone ID no. 1926644
  misc_feature: Bit score of 782.0 for HMM based on sequences of Figure 30
  misc_feature: Functional Homolog Of SEQ ID NO. 2748
MGNSFFLGILVTISLCLQLFGGGAYGLGVNWGTMASHKLPPKTVVQMLKDNGIKKVKLFDADSTTMNALAGSDIEVMVAIPNDQLLAMNSYKRAKDWVRRNVTRYNFDGGVNIKYVAVGNEPFLTTYNGSFINITFPALENIQNALNEAGVGDSIKATMPSNADVYNSPESNPVPSAGRFRPDISGLMTQIVEFLAKNGAPFTINIYPFLSLYGNDDFPFNYAFFDGGNPIVDNGIQYTNVFDANFDTLVSSLRAIGHGDMTIIVGEVGWPTDGDKNANIANAQRFYNGLMPRLAGNVGTPLRPGYLEVYLFGLLDEDVKSVAPGNFERHWGIYRYDGQPKFPLDLSGQNQNRFLIPAQNVEYLPQKWCVFNPNANDLSKLADNINYACTFSDCTALGYGSSCNILDANGNASYAFNMYYQVQNQDDMACNFQGLATVITHSPSQGTCNFIIQIASSSFAIGPSLIGMTFFAVIATVLL

SEQ ID NO: 2802 - protein, 492 aa, Oryza sativa subsp. indica
  misc_feature (29)..(353): Pfam Name: Glyco_hydro_17 Pfam Description: Glycosyl hydrolases family 17
  misc_feature (371)..(455): Pfam Name: X8 Pfam Description: X8 domain
  misc_feature: Public GI ID no. 125544205
  misc_feature: Bit score of 916.2 for HMM based on sequences of Figure 30
  misc_feature: Functional Homolog Of SEQ ID NO. 2748
MGSCAAVHALAVAWAVAALLSRATPAGALAANWGTRALHPLPGDVTVRLLRDNGFDKVKLFEADPSALRALGHTGIQVMVGLPNELLAPVSSSVAAAEQWVLHNVSSYISKLGVDIRAVAVGNEPFLKSYKGKFEAATLPAVQNVQAALVKAGLARQVRVTVPLNADVYESLDGRPSAGDFRPDIAGLMVGLVRFLLDNGGFLTINIYPFLSLQADPNFPADYAYFPSPGSPPSQASVQDGGVLYTNVFDANYDTLISALEKHGLGAIAVVVGEIGWPTDGDKSANAANAQRFNQGLFDRILAGKGTPRRPQMPDVYVFALLDEDAKSIDPGSFERHWGVFNYDGSLKYNLRLAGGRSIAPAKGVRYLSRQWCVLRPDASPADPVIGGAVGYACQYADCTSLGAGSSCGGLDARGNVSYAFNQFFQAANQMKGSCNFNNLSMITTSDPSQGTCRFQIEIDTGRHDLAVASSASAAATSVAAVLLLALLGLVI

SEQ ID NO: 2803 - protein, 492 aa, Oryza sativa subsp. japonica
  misc_feature (29)..(353): Pfam Name: Glyco_hydro_17 Pfam Description: Glycosyl hydrolases family 17
  misc_feature (371)..(455): Pfam Name: X8 Pfam Description: X8 domain
  misc_feature: Public GI ID no. 30017525
  misc_feature: Bit score of 916.7 for HMM based on sequences of Figure 30
  misc_feature: Functional Homolog Of SEQ ID NO. 2748
MGSCARVHALAVAWAVAALLSRATPAGALAANWGTRALHPLPGDVTVRLLRDNGFDKVKLFEADPSALRALGHTGIQVMVGLPNELLAPVSSSVAAAEQWVLHNVSSYISKLGVDIRAVAVGNEPFLKSYKGKFEAATLPAVQNVQAALVKAGLARQVRVTVPLNADVYESLDGRPSAGDFRPDIAGLMVGLVRFLLDNGGFLTINIYPFLSLQADPNFPADYAYFPSPGSPPSQASVQDGGVLYTNVFDANYDTLISALEKHGLGAIAVVVGEIGWPTDGDKSANAANAQRFNQGLFDRILAGKGTPRRPQMPDVYVFALLDEDAKSIDPGSFERHWGVFNYDGSRKYNLRLAGGRSIAPARGVRYLSRQWCVLRPDASPADPAIGGAVGYACQYADCTSLGAGSSCGGLDARGNVSYAFNQFFQAANQMKGSCNFNNLSMITTSDPSQGTCRFQIEIDTGRHDLAVASSASAAATSVAAVLLLALLGLVI

SEQ ID NO: 2804 - protein, 479 aa, Vitis vinifera
  misc_feature (25)..(345): Pfam Name: Glyco_hydro_17 Pfam Description: Glycosyl hydrolases family 17
  misc_feature (366)..(449): Pfam Name: X8 Pfam Description: X8 domain
  misc_feature: Public GI ID no. 225441645
  misc_feature: Bit score of 812.5 for HMM based on sequences of Figure 30
  misc_feature: Functional Homolog Of SEQ ID NO. 2748
MVRRLWFFSWVLLVGLFGCASVEGLGVNWGTMASHKLPPKVVVQMLKDNGIQKVKLFDADSVTMSALAGSGIEVMVAIPNDQLAVMNDYDRAKAWVRRNVTRYNFNGGVTIKYVGVGNEPFLSSYNGSFLNITLPALQNIQNALNEAGVGDSIKATVPLNADVYNSPESNPVPSAGRFRTDISELMTQIVQFLNKNNAPFTVNIYPFLSLYGNDNFPFDYAFFDGVSNPIVDNGISYTNVFDANFDTLVSALKAVGLGDMTILVGEVGWPTDGDKNANSNNAYRFYNGLLPRLAGNIGTPLRPGYIEVYLFGLIDEDAKSIAPGNFERHWGIFKYDGQPKYALDLSGQGQNKLLVAAKDVTYLPQKWCMFNPNAGDLSKLGDNINYACTFSDCTALGYGSSCNGLDAQGNASYAFNMYFQVKNQDDLSCYFQGLAKVTTQNISQGSCNFIVQIESSSSSLWQPSLVASAFVMVLAFLVL

SEQ ID NO: 2805 - DNA, 1828 bp, Triticum aestivum
  misc_feature: Ceres Clone ID no. 616565
  misc_feature: Encodes the peptide sequence at SEQ ID NO. 2806
aatccgcgttaaattcgtgaactcttcttccgtgcagcgtgcgtgcgtgtgtgtggcctcaaagctcagctcggctggtgctagcttgcttcgaacgttcgtgaactcttcttgcgtgcgtgcgtggtcgtgtggctgagagctttgctctggtgcttcgatcatggcgggcgtggccgtggcgccggtgctgctgcttctgctgctcgccgtcgcggggcttccggcggccggggggctcggggtgaactggggaacgatggcgtcgcaccagctgccgcccagcaccgtggtgcggatgctgcaggacaatggcatcaagaaggtgaagctgttcgacgcggacgctgagccgctgggcgcgctcgccggctccggcatcgaggtcatggtggccatccccaacaagatgctcgacatgatgaccgactacgacaccgccagggagtgggtgcacaagaacgtcagcgcctacaacttcggcggcggcgtcaacatccgatatgttgccgtcgggaatgagccgtttctgtcgtccctgaatggcacgttcctgaatgtcacgttgccggccctacagaacatccagaaggccctcgacgaggccggcgtcggcgacaccgtcaaggccaccgtaccgctgaacgccgacgtgtaccaatcccccaaggacaacccggtgccgtcggccgggcggtttcggccggagatctccggcctcatgacggagatcgtgcagttcctcaaccagagcggcgcgcccttcacggtcaacatctacccatacctgagcctctacggcaacgacgacttcccgctggacttcgccttcttcgacggcgccagctcccccgtggtcgacggcaacatccagtacaccaacgtgttcgacgccaacttcgacacgctcgtgtcggcgctcacggcggccggcgtaggcggcctgccggtgatcgtcggcgaggttggctggccgaccgacggtgaaaagcacgccacggccgcctacgcgcagcgcttctacacgggcctgtttcggaagctggcgagcaacgccggcacgccgctgcggcccaaccagtacatcgagatctacctcttcagcctcatcgacgaggacgtcaagagcgtggatccgggctacttcgagcggcactggggcgtgatgcgctatgacggccagcccaagtacgccatggacccgaccgggcagggccggaacacggcgctggtgggggcccggggcgtggagtacctcccgcgggtgtggtgcgtgctcaacgccaacgcggggaacatgagcaggctcgcggacaacgtgggctacgcgtgctccaacgccgactgcacctcgctcagcctcgggtcgacgtgcaacggcatggaccccgcggggaacgcctcctacgccttcaacgcctacttccaggtgcaggaccaggacgagcaggcgtgcggcttcgacgggctcgccgtgcgcacgcggcaggacccctccacgggcacctgcaacttcaccatacagctcgagaccacctccgcggcggcggggcggccgacagttctcttgacgacggccctgctggccttggttcttgcggccatggtgaccatgctctgagcgcgaatctgattgctatatatggcggtgctagttagtagtgattggagcagttaattaactatacaaggaaggagctagctagatgttacacacttgtagttgtagatattcttttggtttgtatacgcgatacgccactgtagtatgtatgtatgatcacaggggcccatggacctcggattccaagggtttatttagatgtat

SEQ ID NO: 2806 - protein, 485 aa, Triticum aestivum
  misc_feature (26)..(347): Pfam Name: Glyco_hydro_17 Pfam Description: Glycosyl hydrolases family 17
  misc_feature (368)..(451): Pfam Name: X8 Pfam Description: X8 domain
  misc_feature: Ceres Clone ID no. 616565
  misc_feature: Bit score of 817.2 for HMM based on sequences of Figure 30
  misc_feature: Functional Homolog Of SEQ ID NO. 2748
MAGVAVAPVLLLLLLAVAGLPAAGGLGVNWGTMASHQLPPSTVVRMLQDNGIKKVKLFDADAEPLGALAGSGIEVMVAIPNKMLDMMTDYDTAREWVHKNVSAYNFGGGVNIRYVAVGNEPFLSSLNGTFLNVTLPALQNIQKALDEAGVGDTVKATVPLNADVYQSPKDNPVPSAGRFRPEISGLMTEIVQFLNQSGAPFTVNIYPYLSLYGNDDFPLDFAFFDGASSPVVDGNIQYTNVFDANFDTLVSALTAAGVGGLPVIVGEVGWPTDGEKHATAAYAQRFYTGLFRKLASNAGTPLRPNQYIEIYLFSLIDEDVKSVDPGYFERHWGVMRYDGQPKYAMDPTGQGRNTALVGARGVEYLPRVWCVLNANAGNMSRLADNVGYACSNADCTSLSLGSTCNGMDPAGNASYAFNAYFQVQDQDEQACGFDGLAVRTRQDPSTGTCNFTIQLETTSAAAGRPTVLLTTALLALVLAAMVTML

SEQ ID NO: 2807 - protein, 481 aa, Vitis vinifera
  misc_feature (27)..(345): Pfam Name: Glyco_hydro_17 Pfam Description: Glycosyl hydrolases family 17
  misc_feature (366)..(450): Pfam Name: X8 Pfam Description: X8 domain
  misc_feature: Public GI ID no. 225438519
  misc_feature: Bit score of 826.4 for HMM based on sequences of Figure 30
  misc_feature: Functional Homolog Of SEQ ID NO. 2748
MARAGAFVWAFLSVVLLAFNTSHGDALGVNWGTQASHILQPSIVVRLLKDNGINKVKLFDADSWTVNALAGSGIEVMVGIPNKDLQRYNSYKKAKHWVEKNVTKHLYDGGVDIRYVAVGNEPFLTSYNGSFLNTTFPALSNIQKALDEAGHGDKIKATIPLNADVYESATNKPSDGQFRKDIKDLMIKIVKLLHEKKSAFVVNIYPFLSLYQNPDFPLDFAFFNGGGNPTEDKGVQYTNVFDANHDTLVWALRKAGVPDLKILVGEIGWPTDGDKNANLKLARRFYDGLLKKLADGKGTPLRPGRLDVYLFGLIDENMKSVAPGSFERHWGIFFFDGKPKFPMDFSGKGLDKFLEPAKGVIYLEPKWCVLNRDAVKNMTQVEPFVNYACSNSDCTSLGYGSSCNNLDQNGNVSYAFNMYFQMQNQDVEACNFNGMGKITTKNASTGTCLFPVQMMSAGEKLIGYGVSVTGFMGLVLFGLLW

SEQ ID NO: 2808 - DNA, 1437 bp, Populus balsamifera subsp. trichocarpa
  misc_feature: Ceres Annot ID no. 1523133
  misc_feature: Encodes the peptide sequence at SEQ ID NO. 2809
atgggtacttgttggtttcttagattggttttgattttaggccttttagggagttgtgttcatggtcttggtgttaattggggaactatggctatacgtaaattgtcaccagaaacagttgttcaaatgttgaaggataatggcatcctaaaagtgaagctttttgatgcagaccaaactacaatgactgcgcttgctggttctggcattgaagttatggttgctattcctaatgatcagcttgctgtaatgggtgattataatcgtgctaaagattgggtcaagaggaatgtcactcgttataacttcaatggaggaattaccatcaagtatgtagcagttggtaatgagcctttcctcacatcctataatggttcattcttaaacaccaccttcccagcacttcggaacatacagaatgcccttaatgatgctggggtaggagactccataaaggccactgtacccttaaatgctgatgtctacggctcgccagatgaccaagcttatccatcttctggaagattccgcagtgatatcaatgacattatgacccagattgttcagtttttgagtcagaacggagcgcctttcactgtgaacatctatcctttcctaagtctttatgggaatgatgatttcccatttgattatgctttctttgatggggctcctcaacctgttgtagacaaaggtactgggattcagtacaccaacgtttttgatgccaactttgacaccttggtttcggccttgaaagcagcggggcatggggatatgcccattgtagtaggcgaggtaggctggcccacagatggggacaagaatgccaacataggttatgctactagattttacaatggacttataccacgacttgtaggcaatagaggcactccacttcggcctggctacattgaagtatacctgtttggtcttcttgacgaggatgccaagagcatcgctcctggaaattttgagcgccattgggggatctttcgttatgatgggcagccaaaatttcctctagatctttctggtcagaatcaaaacaagtttcttgcgggcgcgcggaatgtgcaatatcttccggctaaatggtgtatgtttaatccaaatgctaaggatcttagcaagcttgcagagaacatagattatgcttgctcacgttcagactgcactgcacttggatacggctcttcttgcaacagcttggactccaatgggaatgcttcatatgctttcaacatgtactaccaggtacaaaaccaggatgaattcgcctgtaattttgaaggcctggccacgcttaccaatcagaatatttcccaagggaattgcaatttcatcattcagatagtagcttcgtcctcctcctccctcaccctgtcattgatggcatttgtaacagtattattaacattcctgtttctatag

SEQ ID NO: 2809 - protein, 478 aa, Populus balsamifera subsp. trichocarpa
  misc_feature (23)..(345): Pfam Name: Glyco_hydro_17 Pfam Description: Glycosyl hydrolases family 17
  misc_feature (366)..(449): Pfam Name: X8 Pfam Description: X8 domain
  misc_feature: Ceres Annot ID no. 1523133
  misc_feature: Bit score of 798.4 for HMM based on sequences of Figure 30
  misc_feature: Functional Homolog Of SEQ ID NO. 2748
MGTCWFLRLVLILGLLGSCVHGLGVNWGTMAIRKLSPETVVQMLKDNGILKVKLFDADQTTMTALAGSGIEVMVAIPNDQLAVMGDYNRAKDWVKRNVTRYNFNGGITIKYVAVGNEPFLTSYNGSFLNTTFPALRNIQNALNDAGVGDSIKATVPLNADVYGSPDDQAYPSSGRFRSDINDIMTQIVQFLSQNGAPFTVNIYPFLSLYGNDDFPFDYAFFDGAPQPVVDKGTGIQYTNVFDANFDTLVSALKAAGHGDMPIVVGEVGWPTDGDKNANIGYATRFYNGLIPRLVGNRGTPLRPGYIEVYLFGLLDEDAKSIAPGNFERHWGIFRYDGQPKFPLDLSGQNQNKFLAGARNVQYLPAKWCMFNPNAKDLSKLAENIDYACSRSDCTALGYGSSCNSLDSNGNASYAFNMYYQVQNQDEFACNFEGLATLTNQNISQGNCNFIIQIVASSSSSLTLSLMAFVTVLLTFLFL

SEQ ID NO: 2810 - protein, 501 aa, Arabidopsis thaliana
  misc_feature (30)..(356): Pfam Name: Glyco_hydro_17 Pfam Description: Glycosyl hydrolases family 17
  misc_feature (374)..(459): Pfam Name: X8 Pfam Description: X8 domain
  misc_feature: Public GI ID no. 15242078
  misc_feature: Bit score of 922.3 for HMM based on sequences of Figure 30
  misc_feature: Functional Homolog Of SEQ ID NO. 2748
MSSHDTYQKLILFCLSIFFLQNILKNVEGLACNWGTQASHPLPPNIVVKLLRDNGFNKVKLFEADPGALRALGKSGIQVMVGIPNDLLATMASTVTNAELWVQQNVSQYISRYGTDIRYVAVGNEPFLKTYNNRFVRSTYPALQNVQAALVKAGLGRQVKVTVPLNADVYESSDGLPSSGDFRSDIKTLMISIVRFLADSVSPITFNIYPFLSLNADPNFPREYAFFPNGGGGGGAKPVVDGSISYTNVFDANFDTLVSALEKNGFDANKIEIIVGEVGWPTDGDQNANPAMAQRFNQGLLNRILQGQGTPRRRMAPEVYIFSLVDEDAKSIDPGKFERHWGIFSYDGAVKYPLSLGNGRPLVPTKGVRYQAREWCVLSTQAAGNGAATWQASATYACQNADCTSLGPGSSCAALDPTANASYAFNMYFQKMDHRRGSCDFNNLGVVTKIDPSSGSCRFPIEIDTSRQQMSNPPPRNSGASEAKYRLGAAVVMVICLVFSN

SEQ ID NO: 2811 - protein, 492 aa, Oryza sativa subsp. japonica
  misc_feature (27)..(349): Pfam Name: Glyco_hydro_17 Pfam Description: Glycosyl hydrolases family 17
  misc_feature (370)..(455): Pfam Name: X8 Pfam Description: X8 domain
  misc_feature: Public GI ID no. 115454419
  misc_feature: Bit score of 829.9 for HMM based on sequences of Figure 30
  misc_feature: Functional Homolog Of SEQ ID NO. 2748
MASRSGDRRLAVVAFAAAVLLSAAEGLGVNWGTMASHPLPPRAVVRMLQDNGISKVKLFDADAGTMEALAGSGVEVMVAIPNNLLDLLTDYDAARDWVHENVSRYSFDGGVNIKYVAVGNEPFLSSLNGTFLNVTFPALQNIQRALYDAGHGDTIKATVPLNADVYNSPENMQVPSAGRFRPDIAGLMTEIVQFLNQSGAPFTVNIYPFLSLYGNDNFPLDYAFFDGTTSPVVDTNGIQYTNVFDANFDTLVSALVAAGVGGLPVVVGEVGWPTDGDKHARADLAQRFYAGLLRKLASNAGTPLRPNQYVEVYLFSLVDEDAKSVAPGNFERHWGILRYDGQPKYSMDLAGQGRDTALVAARGVAYLPRAWCVLNPSATPDAMSRVGDNVNYACTYADCTSLGYGSTCNGMDAAGNASYAFNAYFQVQNQVEESCGFQGLAVQTQQDPSTNACNFTIQIEPSAAAGRRPAAVAVTVATAMLISVLAAMVTTP

SEQ ID NO: 2812 - DNA, 1443 bp, Populus balsamifera subsp. trichocarpa
  misc_feature: Ceres Annot ID no. 1532670
  misc_feature: Encodes the peptide sequence at SEQ ID NO. 2813
atgggcacctgttggtttctcaaattagttttggttttaggccttttaaggaattgtgttgatggtcttggtgttaattggggaactatggctatacgtaaattgccaccagaaacagttgttcaaatgttgaaggataatgggatcctaaaagtgaagctttttgatgcagaccaaaatacaatgacttcacttgctggtactggcattgaagttatggttgctattcctaatgaccagcttgctgtgatgggtgattataatcgtgctaaagattgggtaaagaggaatgtaactcgttatgattttgacggaggagttaccatcaagtatgtagcagttggtaatgagccttttctcaaatcctacaatggttcattcttaaacaccaccttcccagcacttcggaacatacaaaatgccctcaatgatgctggggttggagactccataaaggccactgtaccctttaatgctgacgtctataactccccagatgaccaagcctatccatcttctggaagattccgcagtgatattaatgacattatgaccgagatggttcagtttttgggtcagaacaacgcacctttcactgtgaacatctatcctttcttgagtctctatgggaatgacgatttcccatttgattatgctttctttgacggggctcctcaacctgttgtagatagaggtactgggattcagtacaccaatgtttttgatgctaacttcgacaccttggtctcggccctgaaagcagcgggccatggggatatgcccattatagtaggtgaggtaggttggccaacagatggggacaagaatgccaacataggtaatgctattagattttacaatgggcttttaccacgacttgcaggcaacagaggcaccccacttcggcctggctacatagaagtttacttgtttggtcttcttgacgaggatgccaagagcatcgctcctgggaattttgagcgccattggggaatctttcgatatgatgggcagcctaagtttccaatggatctttctggtcaggttgcaaacaagtggctagtgggtgcgcagaatgttcaatatctaccgtcaaaatggtgcatgtttaatccaaacgccaaggatcttagcaagcttgcagataacataaattatgcctgctcccgttcagattgcacggcacttggatatggctcctcctgtaatggcctggacaccaatgggaatgcttcatatgcattcaatatgtactaccaggtgcaaaaccaggatgaattcgcctgtaatttcgagggcctggccatggttaccgaacagaatatttctcaagggaactgcaatttcaccatccagatagtagcttcatcttcctcctctctcaccctgtcattgatgggttctgtatttgtaacagccttgttaacatccctttttctatag

SEQ ID NO: 2813 - protein, 480 aa, Populus balsamifera subsp. trichocarpa
  misc_feature (23)..(345): Pfam Name: Glyco_hydro_17 Pfam Description: Glycosyl hydrolases family 17
  misc_feature (366)..(449): Pfam Name: X8 Pfam Description: X8 domain
  misc_feature: Ceres Annot ID no. 1532670
  misc_feature: Bit score of 795.5 for HMM based on sequences of Figure 30
  misc_feature: Functional Homolog Of SEQ ID NO. 2748
MGTCWFLKLVLVLGLLRNCVDGLGVNWGTMAIRKLPPETVVQMLKDNGILKVKLFDADQNTMTSLAGTGIEVMVAIPNDQLAVMGDYNRAKDWVKRNVTRYDFDGGVTIKYVAVGNEPFLKSYNGSFLNTTFPALRNIQNALNDAGVGDSIKATVPFNADVYNSPDDQAYPSSGRFRSDINDIMTEMVQFLGQNNAPFTVNIYPFLSLYGNDDFPFDYAFFDGAPQPVVDRGTGIQYTNVFDANFDTLVSALKAAGHGDMPIIVGEVGWPTDGDKNANIGNAIRFYNGLLPRLAGNRGTPLRPGYIEVYLFGLLDEDAKSIAPGNFERHWGIFRYDGQPKFPMDLSGQVANKWLVGAQNVQYLPSKWCMFNPNAKDLSKLADNINYACSRSDCTALGYGSSCNGLDTNGNASYAFNMYYQVQNQDEFACNFEGLAMVTEQNISQGNCNFTIQIVASSSSSLTLSLMGSVFVTALLTSLFL

SEQ ID NO: 2814 - DNA, 1813 bp, Panicum virgatum
  misc_feature: Ceres Clone ID no. 1788618
  misc_feature: Encodes the peptide sequence at SEQ ID NO. 2815
aatacccgttgcccactccctccaatctctccatcatcacccaattccgcgtcggcttcttcctccctacgccgcaagagagaaagccgagcgtctcttgaattcatacgtgctcgcgctcgcgcgcgcgtgcacgtgcacagctgacagcgacagctatagcgccgtcttccatggcggcgagctaccggcaggccctcgcggccgctctggtggcggcggcggtcgccgggctgccggcggcgggagcgctcggggtgaactggggcacgatggcgacgcaccggctgccgtcgggcatcgtggtgcggatgctggaggacaacggcatcaggaaggtgaagctgttcgacgccgaccccgggccgatggacgcgctcgccggcagcggcatcgaggtcatggtgggcatccccaacaacatgctggacatgatgacggactacggcacggccagggactgggtgcaccagaacgtcagcagctacaacttcgacggcggcgtgaacatcaaatacgtagccgttgggaatgagcctttcctgtcgtctttcaacggcacgttcctgaacgtcacgctgcccgccctgcagaacatccagcgcgccctcaacgacgccggcctcggcgaaaccatcaaggccaccgtgccgctgaacgccgacgtgtacaactccccgacgagcaaccccgtcccgtccgccggccggttccgcgcggacatcgacgacctcatgacggagatcgtgcagttcctcaaccagagcggcgcgcccttcaccgtcaatatctacccgttcctgagcctgtacggcaacgacggcttcccgctggactacgccttcttcgacggcacgagcaaccccgtggtggacaccggcagcggcatccagtacacgaacgtgttcgacgccaacttcgacacgctcgtgtccgcgctcggcgcggcgggcgtcggcggcctccccgtggtggtcggcgaggtcgggtggccgaccgacggcgacaagcacgccaccgcggcgtacgcgcagaagttctacgcggggctgctgcggaagctgggggccaaggccggcacgccgctgcggccgaaccagtacatcgagctgtacctgttcagcctcatcgacgaggacgccaagagcgtggcgccgggcaacttcgagcggcactggggcatcgtgcggtacgacggccagcccaagtacccgatggacctgtccgggcagggcgggaacgcggcgctggtggcgacgcgcggggtgcagtacctgccccggcagtggtgcgtggtgaacccgagcgcgccggacatgggcagcaggatcggcgacagcgtcacctacgcgtgcaccttcgctgactgcacggcgctcgggtacggctcgtcgtgcaacggcatggacgccgccggcaacgcgtcgtacgcgttcaacatgtacttccagacgcagaaccaggtggagggcagctgcgacttccaggggctcgcggcgccgacggcgcagaacccgtccacggacacctgcaatttcatcattcagatcgtggcgtcggcggccccggcgccggcgccggcggcgcctgcgctactcctcttggttcttcgcgctgtcctgctggttgctctgtgactagtgtgtgtggtgctgaactgctaatgacggttggaggaggaggtctcgctctcgcctcgcatgtaaagatttttgttcggttttgtagataatctcgtgttatcagatcattctgaggtccatataagggatgtatatacgtaagagagatttggagaaacggcacattttac

SEQ ID NO: 2815 - protein, 487 aa, Panicum virgatum
  misc_feature (27)..(350): Pfam Name: Glyco_hydro_17 Pfam Description: Glycosyl hydrolases family 17
  misc_feature (371)..(455): Pfam Name: X8 Pfam Description: X8 domain
  misc_feature: Ceres Clone ID no. 1788618
  misc_feature: Bit score of 804.2 for HMM based on sequences of Figure 30
  misc_feature: Functional Homolog Of SEQ ID NO. 2748
MAASYRQALAAALVAAAVAGLPAAGALGVNWGTMATHRLPSGIVVRMLEDNGIRKVKLFDADPGPMDALAGSGIEVMVGIPNNMLDMMTDYGTARDWVHQNVSSYNFDGGVNIKYVAVGNEPFLSSFNGTFLNVTLPALQNIQRALNDAGLGETIKATVPLNADVYNSPTSNPVPSAGRFRADIDDLMTEIVQFLNQSGAPFTVNIYPFLSLYGNDGFPLDYAFFDGTSNPVVDTGSGIQYTNVFDANFDTLVSALGAAGVGGLPVVVGEVGWPTDGDKHATAAYAQKFYAGLLRKLGAKAGTPLRPNQYIELYLFSLIDEDAKSVAPGNFERHWGIVRYDGQPKYPMDLSGQGGNAALVATRGVQYLPRQWCVVNPSAPDMGSRIGDSVTYACTFADCTALGYGSSCNGMDAAGNASYAFNMYFQTQNQVEGSCDFQGLAAPTAQNPSTDTCNFIIQIVASAAPAPAPAAPALLLLVLRAVLLVAL

SEQ ID NO: 2816 - protein, 485 aa, Vitis vinifera
  misc_feature (29)..(349): Pfam Name: Glyco_hydro_17 Pfam Description: Glycosyl hydrolases family 17
  misc_feature (370)..(453): Pfam Name: X8 Pfam Description: X8 domain
  misc_feature: Public GI ID no. 225445328
  misc_feature: Bit score of 800.7 for HMM based on sequences of Figure 30
  misc_feature: Functional Homolog Of SEQ ID NO. 2748
MGEARLSCYHLLVLFLVMWMSMRSSGFGVGVNWGTMATHQLPPEKVVRMLKDNGFRKLKLFEADERILEALTGTHIEVMLAIPNYMLPEMSEDPSVATSWVQANVSSYSYAGGVNIKYVAVGNEPFLQTYNGTFLKYTLPALKNIQQALNNEALESVKATVPFNADIYYSPDSNPVPSAGDFRAEVRDLTIEIIQYLHSNDAPFTVNIYPFLSLYGNAYFPMDYAFFDGSNKPIKDGNNVYTNVFDANFDTLVWALDRAGYPDVKIIVGEVGWPTDGDKNANVKNAKRFNQGLIHHVLSGKGTPARKGKIEAYLFSLIDENAKSIAPGCFERHWGIFEYDGKPKYELDVSGSRENKGLVAAEGVKYMVRRWCVLNPNTDDLEDLPDSINYACSMSDCTALGYGSSCNHLSVAGNASYAFNMYYQVNNQQSWDCDFSGLGIETEEDPSDDECLFPVMIAHGSSLALHRLDFLASIVGGWMVFLLMV

SEQ ID NO: 2817 - DNA, 1866 bp, Zea mays
  misc_feature: Ceres Clone ID no. 1596827
  misc_feature: Encodes the peptide sequence at SEQ ID NO. 2818
gcgacgtcccagtcccacattccagcagcttcccttcctcctcctatctctcccccgcaccctcctcctcagttcctagagccgctggagctccgacccagaattccactcgcgtcctctcccgccacggtcgctactgtacagtacagtccagccccgaaatctgtccactcgttcgcaacccagtccggcggcccgagtggctctcgtcggctccaagaagctcgcaccgcggtcccgtgcggatggcggcgaggctcgcggcggcggtgctgctctgcgcctgcgcggtggggccggcgacggcgctgggggtgaactggggcacgcaggcgacgcacccgctgccgcccaaggccgtggtgcaggtgctccgggacaacggcatcaagaaggtgaagctgttcgatgccgaccccgccgccatgcgcgcgctcgccggcaccggcatcgaggtcatggtcgccatccccaacgccatgctcgcgggcctggccgccgacgccggccaggccaggaactgggtcaagcacaacgtcaggcgctacgacttcgacggcggcgtcaccatcaagtacgtggccgtcggcaacgagccgttcctggagtcgtacaacgggtccttcatcaacgtcacgctcccggcgctgaagaacgtccagaacgctctgaacgacgccgggatcggcgaccggatcaaggcgaccgtgccgctgaacgccgacgtgtacaactcccctcggagcaacccggttccgtcggcggggcggttccgcgccgacatcgcggggctgatggcggacatggtgaggttcctggctcggaacggcgcgcccttcaccgtgaacatctacccgttcctgagcctgtacctgaacgagcacttcccgctggactacgccttcttcgacggcggcgcggcgccagtggacgaccacggcgtgctgtacaccaacgtgttcgacgccaacttcgacacgctggtggcggcgctgggggccgtggggcacggcgacatgccggtggtcgtgggcgaggtggggtggcccacggacggcgacaggcacgccaaggcgtcctacgcgcagcgcttctacgcgggcctgctgcggcggctggcggcgaacaccggcacgccggcgaggccgggccagcgcccggcggaggtgtacctgttcgggctcgtcgacgaggacgccaagagcgtcgcgccgggcaacttcgagcgccactggggcgtgctgcggtacgacggccagcccaagttcgccatggacctcacggggcagggccgggacacgacgctggtgccggcgcgcggcgtggcgtacctgtccaggacgtggtgcgcgctgaaccccagagccaaggacctcggcaggctcggcgccaacgtcgactacgcctgcacgttcgccgactgcacgccgctggggtacggctccacgtgcggcggcatggacgtcgccggcaacgcgtcgtacgcgttcaacgcgtactaccaggcgcagaaccagaaggacgaggcctgcgacttccagggccttgcgctgcccaccgagaccgacccctccaccgccacctgcaacttcaccatacagatccagacgggggcggcggccatggcgtcgctcggccggagcgcgagcgccgccgcgctggtgctggcgtcggcgtcgctgcagctcctggcgctgttgtggtagcagctggttttgtgtggatgtgcgtgctggcatgaagatcaacgtcgtgtacggttggttgattgatttctgcatttttttatcattcaaaacacgtttttttatatataatttggaccggagtagatgcttgtttactttctaaggttgacatgtgcat

SEQ ID NO: 2818 - protein, 486 aa, Zea mays
  misc_feature (22)..(345): Pfam Name: Glyco_hydro_17 Pfam Description: Glycosyl hydrolases family 17
  misc_feature (366)..(449): Pfam Name: X8 Pfam Description: X8 domain
  misc_feature: Ceres Clone ID no. 1596827
  misc_feature: Bit score of 825.8 for HMM based on sequences of Figure 30
  misc_feature: Functional Homolog Of SEQ ID NO. 2748
MAARLAAAVLLCACAVGPATALGVNWGTQATHPLPPKAVVQVLRDNGIKKVKLFDADPAAMRALAGTGIEVMVAIPNAMLAGLAADAGQARNWVKHNVRRYDFDGGVTIKYVAVGNEPFLESYNGSFINVTLPALKNVQNALNDAGIGDRIKATVPLNADVYNSPRSNPVPSAGRFRADIAGLMADMVRFLARNGAPFTVNIYPFLSLYLNEHFPLDYAFFDGGAAPVDDHGVLYTNVFDANFDTLVAALGAVGHGDMPVVVGEVGWPTDGDRHAKASYAQRFYAGLLRRLAANTGTPARPGQRPAEVYLFGLVDEDAKSVAPGNFERHWGVLRYDGQPKFAMDLTGQGRDTTLVPARGVAYLSRTWCALNPRAKDLGRLGANVDYACTFADCTPLGYGSTCGGMDVAGNASYAFNAYYQAQNQKDEACDFQGLALPTETDPSTATCNFTIQIQTGAAAMASLGRSASAAALVLASASLQLLALLW

SEQ ID NO: 2819 - protein, 480 aa, Medicago truncatula
  misc_feature (26)..(346): Pfam Name: Glyco_hydro_17 Pfam Description: Glycosyl hydrolases family 17
  misc_feature (367)..(450): Pfam Name: X8 Pfam Description: X8 domain
  misc_feature: Public GI ID no. 124365582
  misc_feature: Bit score of 794.5 for HMM based on sequences of Figure 30
  misc_feature: Functional Homolog Of SEQ ID NO. 2748
MEKNWIFAMLLMLGLMGCFCCYVEGLGVNWGTQATHKLPPETVVKMLKDNGIQKVKLFDADDTTMTALAGSGIEVMVAIPNNQLAEMNDFKRAQYWVRKNVTRYNFDGGVKIKYVAVGNEPFLKAYNNSFLNITFPALQNIQNAINEAGLGDTVKATVPLNADVYMSPPDNQVPSAGIFRPDINGLMTQMVQFLNKNGAPFTVNIYPFLSLYGNDDFPFNFAFFDGVDKPITDNGIQYTNVFDANFDTLVSALKSIGFGDTPILVGEVGWPTEGDKNANSGNAIRFYNGLLSRLAANRGTPLRPGFIEVYLFGLIDEDAKSIAPGNFERHWGIFRYDGQPKFPMDLSGQLQNKLLVGAQGVKYLDPMWCMFNPDAKDLSKLADNINFACTFGDCTALGYGSSCNNLDANGNASYAFNMYYQTQNQDRQACNFEGLAKPTTDNISTPTCNFIIQIVPSSASSLMPSFAALLFIAFSVILLA

SEQ ID NO: 2820 - DNA, 1921 bp, Panicum virgatum
  misc_feature: Ceres Clone ID no. 1786326
  misc_feature: Encodes the peptide sequence at SEQ ID NO. 2821
gtctatacaagctcccttcccgatcgattctcatcgatcttgcatctctcttcgccgcaaatttaaagctttctttgtttggacttgtggaagcaataaatcttgaagcttccttagcctgattgcattggtctctcctgctccagtcgattggttgctgggagttcagagctgttgagatcttcgcaggctccgatcagcgcgccgggatggcgaatctagccgcggtgcgcccgtggctctgcttgctggcggcaatggcggcggcgtcgtggtccggcgtcgcgacggtggacgcgctggggatgaactggggcacgcaggcgacgcaccccctgtcgcccaaggtcgtggtgcagatgctcaaggacaacggcatcaagaaggtgaagctgttcgacgccgaccagagcacgctcagcgcgctcgccggcagcggcatcgaggtcatggtcgccattcccaatgtcctgcttgacaggatcaccgactacgacaccgccaaggagtgggtacggcacaacgtctcgcgctacaacttcgacggcggcgtcaccatcaagtacgtggccgtgggcaacgagccgttcctggcggcgtacaacggcacgttcgacaaggtgaccttcccggcgctgcagaacatccagaacgcgctggacgaggccgggctgggcgacaccatcaaggccaccgtccctctcaacgccgacgtgtacatgtccccggcggacaacccggtgccgtcggcggggcggtggcggcccgacatcgcggacctgatgacgcagatggtgcagttcctgagcaaccacagcgcgcccttcaccgtgaacatctacccgttcatcagcctgttcctcaacgacaacttccccgtggacttcgccttcttcgacggcggcgcgacgcccgtggtggacaacggcgtgtcctacaccaacgtgttcgacgccaacttcgacaccctggtggcggcgctcaaggcgtccgggcacggcgacatgcccatcgtcgtcggcgaggtcggctggcccaccgacggcgacaagcacgccaccaacgcgtacgcgcagcgcttctacagcggcctcctcaagcggctcgccgccaacaccggcacccccgtccggcccaaccagtacatcgaggtctacctcttcggcctcctcgacgaggacgtcaagagcgtggcgcccggcaacttcgagcgccactggggcgtcctccggtacgacgggcagcccaaattcccgatggacctgacggggcagggccagaacacgatgctggtgccggcgcgcggcgtggagtacctgtcccggacgtggtgcgtcgtcaacaccgagtcgcccaacatggacaagctcgccgacaacatcaacttcgcctgcaccttcgccgactgcacggcgctgggctacggctcgacgtgcggcggcatggacagcaacggcaacgcgtcctacgccttcaacgccttcttccagatgaaggaccaggacgaccagtcctgcgacttccagggcctcgccaggcccacgcagacggacccgtccacgcccgcctgcaacttcaccatacagatcgccaccacctcggcggcgggccaccggcggccgcgccgcgtggccgccgccgccgccgtgctgttcttggcgcagctgatgatcctgctgcattagagactgtgtgtgcacttagtgcgtactacttagatatgcaggttattgttcatctttggttggtttggggcatttttcgcagggcactcttggagattatagtttgttcgttcgtcggggttattcttggtgaaataattggtactaggaactagtagaaagtgttgtgctggagatatacatgtatacttcaggttcgggatattatatactgatgtgagatgctggactgtatc

SEQ ID NO: 2821 - protein, 491 aa, Panicum virgatum
  misc_feature (31)..(352): Pfam Name: Glyco_hydro_17 Pfam Description: Glycosyl hydrolases family 17
  misc_feature (373)..(456): Pfam Name: X8 Pfam Description: X8 domain
  misc_feature: Ceres Clone ID no. 1786326
  misc_feature: Bit score of 802.4 for HMM based on sequences of Figure 30
  misc_feature: Functional Homolog Of SEQ ID NO. 2748
MANLAAVRPWLCLLAAMAAASWSGVATVDALGMNWGTQATHPLSPKVVVQMLKDNGIKKVKLFDADQSTLSALAGSGIEVMVAIPNVLLDRITDYDTAKEWVRHNVSRYNFDGGVTIKYVAVGNEPFLAAYNGTFDKVTFPALQNIQNALDEAGLGDTIKATVPLNADVYMSPADNPVPSAGRWRPDIADLMTQMVQFLSNHSAPFTVNIYPFISLFLNDNFPVDFAFFDGGATPVVDNGVSYTNVFDANFDTLVAALKASGHGDMPIVVGEVGWPTDGDKHATNAYAQRFYSGLLKRLAANTGTPVRPNQYIEVYLFGLLDEDVKSVAPGNFERHWGVLRYDGQPKFPMDLTGQGQNTMLVPARGVEYLSRTWCVVNTESPNMDKLADNINFACTFADCTALGYGSTCGGMDSNGNASYAFNAFFQMKDQDDQSCDFQGLARPTQTDPSTPACNFTIQIATTSAAGHRRPRRVAAAAAVLFLAQLMILLH

SEQ ID NO: 2822 - protein, 492 aa, Zea mays
  misc_feature (34)..(355): Pfam Name: Glyco_hydro_17 Pfam Description: Glycosyl hydrolases family 17
  misc_feature (376)..(459): Pfam Name: X8 Pfam Description: X8 domain
  misc_feature: Public GI ID no. 48374979
  misc_feature: Bit score of 817.9 for HMM based on sequences of Figure 30
  misc_feature: Functional Homolog Of SEQ ID NO. 2748
MAAASYDRLAVAASAVVVAAVALAVAGLPAAGALGVNWGTMATHQLPPATVVRMLEDNGIRKVKLFDADAGPMDALAGTSVEVMVAIPNNMLDMMTDYGTARDWVRQNVSRYNFDGGVNIKYVAVGNEPFLSSFNGTFLNVTLPALQNIQRALNDAGFGDTIKATVPLNADVYNSPKDNLVPSAGRFRPDIAGLMTEIVQFLNQSGAPFTVNIYPFLSLYDNDDFPLDYAFFDGTGSPVVDNGIQYTNVFDANFDTLVSALAAAGVGGLPVVVGEVGWPTDGDKHATAAFAQKFYAGLLRKLAASAGTPLRPGQYIEVYLFSLIDEDAKSVAPGNFERHWGIMRYDGQPKYAMDLSGQGRNTALVAARGVQYLPRQWCVVNPNAQDTSKIGDSVTYACTFSDCTSLGYGSSCNGLDAAGNASYAFNMYFQVQNQVEGSCYFQGLAVPTSQNPSTDACNFTIQITPSAAGRRRAAAATALLLVVLLAAVHVAP

SEQ ID NO: 2823 - protein, 493 aa, Sorghum bicolor
  misc_feature (31)..(354): Pfam Name: Glyco_hydro_17 Pfam Description: Glycosyl hydrolases family 17
  misc_feature (376)..(459): Pfam Name: X8 Pfam Description: X8 domain
  misc_feature: Public GI ID no. 18483232
  misc_feature: Bit score of 814.3 for HMM based on sequences of Figure 30
  misc_feature: Functional Homolog Of SEQ ID NO. 2748
MAAASYDRLAVAASLLVAAVVVAGLPAAGALGVNWGTMATHRLPPGTVVRMLEDNGIRKVKLFDADAGPMDALAGTSVEVMVAIPNNMLDMMTDYGTARDWVHQNVSRYNFDGGVNIKYVAVGNEPFLSSFNGTFLNVTLPALQNIQRALNDAGLGDSIKATVPLNADVYNSPTESPYPSAGRFRSDIADLMTEIVQFLNQSGAPFTVNIYPFLSLYDSDDFPLDYAFFDGTSSPVVDAGNGIRYTNVFDANFDTLVSALAAAGVGGLPVVVGEVGWPTDGDKHATAAYAQKFYAGLLRKLAANAGTPLRPGQYIEVYLFSLVDEDAKSVAPGNFERHWGIMRYDGQPKYGMDLSGQGRTNTALVAARGVQYLPRQWCVVNPNAQDMSKIGDGVTYACTFSDCTSLGYGSSCNGLDAGGNASYAFNMYFQVQNQVEGSCDFQGLAVPTAQNPSTDACNFTIQITPSAAGRRRRAIAATALLLLVLLAALHVAP

SEQ ID NO: 2824 - DNA, 1759 bp, Zea mays
  misc_feature: Ceres Clone ID no. 1597530
  misc_feature: Encodes the peptide sequence at SEQ ID NO. 2825
ccttcctggagccgctggagctccgacccagaattccactcgcgtcctctcccgccaaggtcgctactgtacagtacagtccagccccgaaatctgtccactcgttcgcaacccagtccggcgggcccgagtggctctcgtcggctccaagaagctcgcaccgtggtcgtgggcggatggcggcggcggcgctggcggtgctgctgtgcgcctgcgcggcgtggccggcgacggcgctgggggtgaactggggcacgcaggcgacgcacccgctgccgcccaaggccgtggtgcaggtgctccgggacaacggcatcaagaaggtgaagctgttcgacgccgaccccgccgccatgcgcgcgctcgccggcaccggcatcgaggtcatggtcgccatccccaacgccatgctcgcgggcctcgccgccgacgccggccaggccagggactgggtcaagcgcaacgtcaggcgctacgacttcgacggcggcgtcaccatcaagtacgtggctgtcggcaacgagccgttcctcgagtcgtacaacgggtccttcatcaacgtcacgctcccggcgctgcagaacgtccagaacgcgctgaacgacgccgggatcggcgaccggatcaaggcgaccgtgccgctgaacgccgacgtgtacaactccccccggagcaacccggtgccgtcggcggggcggttccgcgccgacatcgcggggctgatggcggacatggtgaggttcctggctcggaacggcgcgcccttcaccgtgaacatctacccgttcctgagcctgtacctgaacgagcacttcccgctggactacgccttcttcgacggcggcgcggcgccagtggacgaccacggcgtgctgtacaccaacgtgttcgacgccaacttcgacacgctggtggcggcgctgggggccgtggggcacggcgacatgccggtggtcgtgggcgaggtggggtggcccacggacggcgacaggcacgccaaggcgtcctacgcgcagcgcttctacgcgggcctgctgcggcggctggcggcgaacgccggcacgccggcgaggccgggccagcgcccggcggaggtgtacctgttcgggctcgtcgacgaggacgccaagagcgtcgcgccgggcaacttcgagcgccactggggcgtgctgcggtacgacggccagcccaagttcgccatggacctcacggggcagggccgggacacgacgctggtgccggcgcgcggcgtggcgtacctgtccaggacgtggtgcgcgctgaaccccagagccaaggacctcggcaggctcggcgccaacgtcgactacgcctgcacgttcgccgactgcacgccgctggggtacggctccacgtgcggcggcatggacgtcgccggcaacgcgtcgtacgcgttcaacgcgtactaccaggcgcagaaccagaaggacgaggcctgcgacttccagggcctcgcgctgcccaccgagaccgacccctccaccgccacctgcaacttcaccatacagatccagacgggggcggcggccatggcgtcgctcggccggagcgctggcgccgccgcgctggtgctggcgtcggcgtcgctgcagctcctggcgcagttgtggtagcagctggttttgtgtggatgtgcgtgctggcaagaagatcaacgtcgtgtacggttggttgattgattctgtgcatttttttatcatccaaaacatgtttttttatatataatttggaccggagt

SEQ ID NO: 2825 - protein, 485 aa, Zea mays
  misc_feature (21)..(344): Pfam Name: Glyco_hydro_17 Pfam Description: Glycosyl hydrolases family 17
  misc_feature (365)..(448): Pfam Name: X8 Pfam Description: X8 domain
  misc_feature: Ceres Clone ID no. 1597530
  misc_feature: Bit score of 820.8 for HMM based on sequences of Figure 30
  misc_feature: Functional Homolog Of SEQ ID NO. 2748
MAAAALAVLLCACAAWPATALGVNWGTQATHPLPPKAVVQVLRDNGIKKVKLFDADPAAMRALAGTGIEVMVAIPNAMLAGLAADAGQARDWVKRNVRRYDFDGGVTIKYVAVGNEPFLESYNGSFINVTLPALQNVQNALNDAGIGDRIKATVPLNADVYNSPRSNPVPSAGRFRADIAGLMADMVRFLARNGAPFTVNIYPFLSLYLNEHFPLDYAFFDGGAAPVDDHGVLYTNVFDANFDTLVAALGAVGHGDMPVVVGEVGWPTDGDRHAKASYAQRFYAGLLRRLAANAGTPARPGQRPAEVYLFGLVDEDAKSVAPGNFERHWGVLRYDGQPKFAMDLTGQGRDTTLVPARGVAYLSRTWCALNPRAKDLGRLGANVDYACTFADCTPLGYGSTCGGMDVAGNASYAFNAYYQAQNQKDEACDFQGLALPTETDPSTATCNFTIQIQTGAAAMASLGRSAGAAALVLASASLQLLAQLW

SEQ ID NO: 2826 - protein, 480 aa, Coffea arabica
  misc_feature (28)..(348): Pfam Name: Glyco_hydro_17 Pfam Description: Glycosyl hydrolases family 17
  misc_feature (369)..(452): Pfam Name: X8 Pfam Description: X8 domain
  misc_feature: Public GI ID no. 37223500
  misc_feature: Bit score of 795.9 for HMM based on sequences of Figure 30
  misc_feature: Functional Homolog Of SEQ ID NO. 2748
MSRIKLLFSLLVLVFVGISNDVVGVEGLGVNWGTQATHKLPPKVVVQMLKDNGITKVKLFDADASTMSALAGSNIEVMVAIPNDQLLVMNDYDRAKNWVKRNVTVYLFNGGVNIKYVAVGNEPFLASYNNSFVNTTFPALQNIQNALNDAGHGDTIKATVPLNADVYFSPEGNPVPSAGRFRADISSQMTQIVQFLNQNNAPFTVNIYPFLSLYLNSHFPVDYAFFDGAANPIVDDGVQYTNVFDANFDALVSALKGLGYGSMNILVGEVGWPTDGDRNANVNYAIRFYRGLLPRLAANKGTPLRPGYIEVYLFGLLDEDLKSVAPGNFERHWGIFRYDGQPKFPMDLSGQLQDKYLVGAQNVQYFPAKWCQFNPNAKDLSKLVENINYACTFADCTALGYGSSCNGLDANGNASYAFNMYFQVQNQGDLSCNFQGLAMVTEQNISQANCNFTIQIATSSSMKLLPVAGLYLAALTFLLL

SEQ ID NO: 2827 - DNA, 1356 bp, Populus balsamifera subsp. trichocarpa
  misc_feature: Ceres Annot ID no. 1479207
  misc_feature: Encodes the peptide sequence at SEQ ID NO. 2828
atggctatacgtaaattgccaccagaaacagttgttcaaatgttgaaggataatgggatcctaaaagtgaagctttttgatgcagaccaaaatacaatgacttcacttgctggtactggcattgaagttatggttgctattcctaatgaccagcttgctgtgatgggtgattataatcgtgctaaagattgggtaaagaggaatgtaactcgttatgattttgacggaggagttaccatcaagtatgtagcagttggtaatgagccttttctcaaatcctacaatggttcattcttaaacaccaccttcccagcacttcggaacatacaaaatgccctcaatgatgctggggttggagactccataaaggccactgtaccctttaatgctgacgtctataactccccagatgaccaagcctatccatcttctggaagattccgcagtgatattaatgacattatgaccgagatggttcagtttttgggtcagaacaacgcacctttcactgtgaacatctatcctttcttgagtctctatgggaatgacgatttcccatttgattatgctttctttgacggggctcctcaacctgttgtagatagaggtactgggattcagtacaccaatgtttttgatgctaacttcgacaccttggtctcggccctgaaagcagcgggccatggggatatgcccattatagtaggtgaggtaggttggccaacagatggggacaagaatgccaacataggtaatgctattagattttacaatgggcttttaccacgacttgcaggcaacagaggcaccccacttcggcctggctacatagaagtttacttgtttggtcttcttgacgaggatgccaagagcatcgctcctgggaattttgagcgccattggggaatctttcgatatgatgggcagcctaagtttccaatggatctttctggtcaggttgcaaacaagtggctagtgggtgcgcagaatgttcaatatctaccgtcaaaatggtgcatgtttaatccaaacgccaaggatcttagcaagcttgcagataacataaattatgcctgctcccgttcagattgcacggcacttggatatggctcctcctgtaatggcctggacaccaatgggaatgcttcatatgcattcaatatgtactaccaggtgcaaaaccaggatgaattcgcctgtaatttcgagggcctggccatggttaccgaacagaatatttctcaagggaactgcaatttcaccatccagatagtagcttcatcttcctcctctctcaccctgtcattgatgggttctgtatttgtaacagccttgttaacatccctttttctatag

SEQ ID NO: 2828 - protein, 451 aa, Populus balsamifera subsp. trichocarpa
  misc_feature (1)..(316): Pfam Name: Glyco_hydro_17 Pfam Description: Glycosyl hydrolases family 17
  misc_feature (337)..(420): Pfam Name: X8 Pfam Description: X8 domain
  misc_feature: Ceres Annot ID no. 1479207
  misc_feature: Bit score of 728.0 for HMM based on sequences of Figure 30
  misc_feature: Functional Homolog Of SEQ ID NO. 2748
MAIRKLPPETVVQMLKDNGILKVKLFDADQNTMTSLAGTGIEVMVAIPNDQLAVMGDYNRAKDWVKRNVTRYDFDGGVTIKYVAVGNEPFLKSYNGSFLNTTFPALRNIQNALNDAGVGDSIKATVPFNADVYNSPDDQAYPSSGRFRSDINDIMTEMVQFLGQNNAPFTVNIYPFLSLYGNDDFPFDYAFFDGAPQPVVDRGTGIQYTNVFDANFDTLVSALKAAGHGDMPIIVGEVGWPTDGDKNANIGNAIRFYNGLLPRLAGNRGTPLRPGYIEVYLFGLLDEDAKSIAPGNFERHWGIFRYDGQPKFPMDLSGQVANKWLVGAQNVQYLPSKWCMFNPNAKDLSKLADNINYACSRSDCTALGYGSSCNGLDTNGNASYAFNMYYQVQNQDEFACNFEGLAMVTEQNISQGNCNFTIQIVASSSSSLTLSLMGSVFVTALLTSLFL

SEQ ID NO: 2829 - DNA, 1581 bp, Sorghum bicolor
  misc_feature: Ceres Annot ID no. 8705326
  misc_feature: Encodes the peptide sequence at SEQ ID NO. 2830
atggcgcgcggcgggcggtccgtgtcccagcccgtggcggcggagctgctgctggtgctcgcggtggcgctgtgcgcggcggcgaggcgcacgagcgcgatcggcgtgaactggggcacgcagctgagccaccagcttccggcgagcacggtggtgcggctgctgcaggacaacggcttcgacaaggtcaagctgttcgacgccgaggacaccatcctcggcgcgctcaagggatccggcatccaggtcatggtcggcatccccaacgacctgctcgccgacctcgccgccggcggcaaggccgccgacaactgggtcgccaagaacgtctctggtcacgtccgcgacggcgtcgatatcaggtacgtggcggtgggcaacgagccgttcctggagacgttcaacgggacgtacctgaagacgacgttcccggcgatgcagaacgtccaggcggcgctggtgaaggccgggctggcggacaaggtgaaggtgacggtgccgttgaacgccgacgtgtaccagtcgccgacggggaagccgtcggacggcgacttccgcgccgacatccacggcctcatgctcaccatcgtgcagttcctggcgtccacggggtcccccttcgtcgccaacgtctaccctttcatcagcctctacgccgacccaaacttcccgctcgactacgccttcttccagggctcctcgtcccccgtcgtcgacggcggcggcgtcacgtaccagaacaccttcgacgccaaccacgacacgctcgtggccgcgctgcgccggaacggcttcggcaacgtctccgtcgtcgtcggcgaggtggggtggccgaccgacggcgacgccaacgctaacctcgactacgcccgccgcttcaaccagggcttcctcacccacatcgcctccggccagggcacgccgctgcggccggggccggtagatgcctacctcttcagcctcatcgacgaggaccgcaagagcatccagccgggcaacttcgagcgacactggggcatcttctactacgacggcacgcccaagtacccgctcagcctcgccgccggcgaggggagtcaagtacctggagaagaagtggtgcgtgctgaagccggcggcggacctcgccgaccagaaggtgggcgacagcgtcagctacgcgtgcgggctcgccgactgcaccagcctcggctacaagacctcctgcgctggcctcgacgccaagggcaacgtctcctacgcctacaacatctactaccagaccatggaccaggacgaccgcgcctgcggcttcaacgggctcgccaccaccacctccgtcgacccgtccgccgggacatgccgcttcatcgtcgagatcgacgtcggcgccgccgccgcgcccagctctgccatggccggcgtcgccgtcgggtgggccgctgccgtgctcgcggccttcgtgctgtccgtggtgttgtgaaactgaatcaagctttggtttccctcgatcgtcgtcacatagataagaccgatcgtggtcttcgcgtgcccttttgtcttgagctcgcttctggtgatgccaggagaattattgactag

SEQ ID NO: 2830 - protein, 526 aa, Sorghum bicolor
  misc_feature (34)..(353): Pfam Name: Glyco_hydro_17 Pfam Description: Glycosyl hydrolases family 17
  misc_feature (378)..(466): Pfam Name: X8 Pfam Description: X8 domain
  misc_feature: Ceres Annot ID no. 8705326
  misc_feature: Bit score of 708.0 for HMM based on sequences of Figure 30
  misc_feature: Functional Homolog Of SEQ ID NO. 2748
MARGGRSVSQPVAAELLLVLAVALCAAARRTSAIGVNWGTQLSHQLPASTVVRLLQDNGFDKVKLFDAEDTILGALKGSGIQVMVGIPNDLLADLAAGGKAADNWVAKNVSGHVRDGVDIRYVAVGNEPFLETFNGTYLKTTFPAMQNVQAALVKAGLADKVKVTVPLNADVYQSPTGKPSDGDFRADIHGLMLTIVQFLASTGSPFVANVYPFISLYADPNFPLDYAFFQGSSSPVVDGGGVTYQNTFDANHDTLVAALRRNGFGNVSVVVGEVGWPTDGDANANLDYARRFNQGFLTHIASGQGTPLRPGPVDAYLFSLIDEDRKSIQPGNFERHWGIFYYDGTPKYPLSLAAGEGSQVPGEEVVRAEAGGGPRRPEGGRQRQLRVRARRLHQPRLQDLLRWPRRQGQRLLRLQHLLPDHGPGRPRLRLQRARHHHLRRPVRRDMPLHRRDRRRRRRRAQLCHGRRRRRVGRCRARGLRAVRGVVKLNQALVSLDRRHIDKTDRGLRVPFCLELASGDARRIID

SEQ ID NO: 2831 - DNA, 1410 bp, Solanum lycopersicum
  misc_feature: Ceres Annot ID no. 8458673
  misc_feature: Encodes the peptide sequence at SEQ ID NO. 2832
atggcgcggagatgtttgagtgtgggagtgaactggggtactatggcatctcatcagttagcagcagagagtgtagtgaagatgcttaaagaaaatggatttgataaagtgaaattatttgaagcagatgacaagattttgagtgctttaataggtagtgatattgaagtgatgcttgcaattcctaattatatgttacaagatatgagtactgaccctggaatggcagcttcttggattgatgctaatgtttctgcttatgcttacactcatggagtcaaaatcaggtatgtagcagtaggaaatgagccttttcttcaaacatacaatggaacttatctacattccacttttccagctctgagaaatgttcaagaagctatcaaccatgctggattagggccagaggtgaaagcagttgttcctttaaacgcggacatttactactcccctgactcgaatcctttcccttcagcaggcgatttcaggccagagatacgcgatttagccattcaaattgttcaatatctcgactcaaatgatgctcctttcgtggtaaacatttaccctttcctcagtctctatgcaaacaattacttcccattcgagtatgccttctttaatggttcaaacaagcctatgaaagatggcgattgtgtttacaccaacgtgtttgatgccaatttcgatactcttgcttggtctttgaagaaagctggatttcccaacatgaaaatcatagtcggagaagtaggatggccaacagatggagacaaacacgcgaatattgaaaatgcaaagagattcaaccaagggttgattcaacatgctttgagtggagaaggaacccctacaaggaaggggaaaattgacgtttacttgttcagcttgattgatgagaatactaaaagcattgctcctggtaactttgagaggcattggggaatcttcgagtttgatggtaagcctaaatatgagctagctataggcttatctgaaaaaccactcgctgcagtagaaggcgtaacatatatgcataaaagatggtgtgtactgaagccacacttaccaaaagatgcacaaatttacctggcaaagagtgttgaatacgcgtgtagtcgttctgattgtactgcattgagctatggttcttcctgtaatcatctgagtgaacaaggaaatacttcatatgctttcaatatgtattatcaattcaataaccagaacagtttggactgtgattttcaaggcttggctatggtaactcataacgatccatccgacgacaagtgccatttccctctcatggttactgatggtcctaaagttatgctgttgcacaagaacttactctacatcatactggctgttctacaaggatttctagtagttttgttgcttgtttcttag

SEQ ID NO: 2832 - protein, 469 aa, Solanum lycopersicum
  misc_feature (8)..(329): Pfam Name: Glyco_hydro_17 Pfam Description: Glycosyl hydrolases family 17
  misc_feature (348)..(433): Pfam Name: X8 Pfam Description: X8 domain
  misc_feature: Ceres Annot ID no. 8458673
  misc_feature: Bit score of 767.6 for HMM based on sequences of Figure 30
  misc_feature: Functional Homolog Of SEQ ID NO. 2748
MARRCLSVGVNWGTMASHQLAAESVVKMLKENGFDKVKLFEADDKILSALIGSDIEVMLAIPNYMLQDMSTDPGMAASWIDANVSAYAYTHGVKIRYVAVGNEPFLQTYNGTYLHSTFPALRNVQEAINHAGLGPEVKAVVPLNADIYYSPDSNPFPSAGDFRPEIRDLAIQIVQYLDSNDAPFVVNIYPFLSLYANNYFPFEYAFFNGSNKPMKDGDCVYTNVFDANFDTLAWSLKKAGFPNMKIIVGEVGWPTDGDKHANIENAKRFNQGLIQHALSGEGTPTRKGKIDVYLFSLIDENTKSIAPGNFERHWGIFEFDGKPKYELAIGLSEKPLAAVEGVTYMHKRWCVLKPHLPKDAQIYLAKSVEYACSRSDCTALSYGSSCNHLSEQGNTSYAFNMYYQFNNQNSLDCDFQGLAMVTHNDPSDDKCHFPLMVTDGPKVMLLHKNLLYIILAVLQGFLVVLLLVS

SEQ ID NO: 2833 - protein, 479 aa, Oryza sativa subsp. japonica
  misc_feature (25)..(343): Pfam Name: Glyco_hydro_17 Pfam Description: Glycosyl hydrolases family 17
  misc_feature (364)..(447): Pfam Name: X8 Pfam Description: X8 domain
  misc_feature: Public GI ID no. 115470771
  misc_feature: Bit score of 801.5 for HMM based on sequences of Figure 30
  misc_feature: Functional Homolog Of SEQ ID NO. 2748
MARLVVVIVAVAMAAWWAVAAVEGLGINWGTQATHPLPPKAVVQLLKDNGIAKVKLFDTDFAAMSALAGSGVEVMVAIPNKDLATMASDYGNAKDWVKKNVKRFDFDGGVTIKYVAVGNEPFLKAYNGSFINITLPALQNVQNALNDAGIGDRIKATVPLNADVYESTVPSAGRFRPEIAGLMTDIVKFLAKNNAPFTVNIYPFLSLYLDEHFPINFAFFDGGSTPVNDGGIMYTNVFDANFDTLVAALKAVGHGDMPIIVGEVGWPTDGDKNARVDLAQRFYAGLLKRLAANVGTPARPNQYIEMYLFGLVDEDMKSVAPGSFERHWGVLRYDGQPKFAMDLAGQGRNTMLVPAKGIEYLPKTWCVINTNAKDVSKLGDNINFACTYADCTPLGFGSSCNGMDTNGNASYAFNAYFQAQSQKEEACNFQGLAVPTETDPTTAQCNFTIQIKSSAAAAAAAPVAAGVVVAALAQLLLLW

SEQ ID NO: 2834 - DNA, 1476 bp, Populus balsamifera subsp. trichocarpa
  misc_feature: Ceres Annot ID no. 1477929
  misc_feature: Encodes the peptide sequence at SEQ ID NO. 2835
atggcactggctggagtatttaccacctatgttttggtgccgtttgttattttcttgaccatgatccctgatgttactagtcgtgttggagtgaactggggcaccatggctacacaccaactcccaccggataatgtggtacagatgctgaaagaaaatgggtttgacaaattgaagttgtttgatgccgatgagaagattatggcagctctgattgggactgatattgaagtaatgctggctataccaaattacatgctgcatgagattagtcaagatcctgcggctgctactgcctgggttgatgaaaatgtgactagctggtcttacactggtggagtcaaaatcaggtatgtagctgttggcaatgaacctttcctgcaaacatataatggcacctatctacatgtcacgttaccagctctaaaaaatatccagcatgccctcaacagagctgggctaggttcccatgtcaaggccacagtccccttcaatgccgacatttacaactcccctggatcaaacccagttccatccgccggtgacttcagacctgatgttcgagacctcacgattgaagtagtccagtttctcaatgaaaacgatgcccctttcactgtcaacatctatccattcctgagtctatacggagaccctaacttccccctcgagtttgcattctttgatggaccaaagaagccgatcacagatggcgactcagtatataccaacgcgtttgatgcaaatcttgacactctcatatggtcattggacaaggctgggtatcctgacatgcagattatgataggagaagtcggttggccaaccgatggtgacaaaaatgctaatatccaaaatgccaagaggttcaaccaagggttgattcgacatgctttgagtggaaacggaacaccaaaaagaaagggcaagaacatcgatgtctatctgtttagcctcattgatgagaatgctaaagcaattgctcccggtagcttcgaaaggcattggggaatatttgagtttgatgggaagcccaaatatggattggatttgatggggttggaagaggacaagggtcttgctccggtggagggagtaaggtatcagctaagaaggtggtgtgttctagaccctgaagcgactgagttagccgagttaccagatagtattgactatgcctgtagtcaatcagattgtactgctttaggttatgggtcttcttgcaatcatctaagtgctgaagggaatgcttcttatgccttcaacatgtactatcaacttaataaccaaggatattgggactgtgatttctctggtttggctctggttacagacaaggatccatctgaagaggactgccagttcccggtaatgattgcttatggtcattcgttggtgctgaacaggaacgggctttcaggtgtgttgctcggaattgttgtggggaacctcctcttcttactactacttagctga

SEQ ID NO: 2835 - protein, 491 aa, Populus balsamifera subsp. trichocarpa
  misc_feature (29)..(351): Pfam Name: Glyco_hydro_17 Pfam Description: Glycosyl hydrolases family 17
  misc_feature (372)..(455): Pfam Name: X8 Pfam Description: X8 domain
  misc_feature: Ceres Annot ID no. 1477929
  misc_feature: Bit score of 815.9 for HMM based on sequences of Figure 30
  misc_feature: Functional Homolog Of SEQ ID NO. 2748
MALAGVFTTYVLVPFVIFLTMIPDVTSRVGVNWGTMATHQLPPDNVVQMLKENGFDKLKLFDADEKIMAALIGTDIEVMLAIPNYMLHEISQDPAAATAWVDENVTSWSYTGGVKIRYVAVGNEPFLQTYNGTYLHVTLPALKNIQHALNRAGLGSHVKATVPFNADIYNSPGSNPVPSAGDFRPDVRDLTIEVVQFLNENDAPFTVNIYPFLSLYGDPNFPLEFAFFDGPKKPITDGDSVYTNAFDANLDTLIWSLDKAGYPDMQIMIGEVGWPTDGDKNANIQNAKRFNQGLIRHALSGNGTPKRKGKNIDVYLFSLIDENAKAIAPGSFERHWGIFEFDGKPKYGLDLMGLEEDKGLAPVEGVRYQLRRWCVLDPEATELAELPDSIDYACSQSDCTALGYGSSCNHLSAEGNASYAFNMYYQLNNQGYWDCDFSGLALVTDKDPSEEDCQFPVMIAYGHSLVLNRNGLSGVLLGIVVGNLLFLLLLS

SEQ ID NO: 2836 - protein, 484 aa, Zea mays
  misc_feature (27)..(349): Pfam Name: Glyco_hydro_17 Pfam Description: Glycosyl hydrolases family 17
  misc_feature (370)..(454): Pfam Name: X8 Pfam Description: X8 domain
  misc_feature: Public GI ID no. 194691368
  misc_feature: Bit score of 744.2 for HMM based on sequences of Figure 30
  misc_feature: Functional Homolog Of SEQ ID NO. 2748
MAAPRGLLALFAVAAAATAAATGVDALGVNWGTMSARRLPPKVMARLLTDNGFTKVKIFDADERTMKGLAGTSIETMIAVPNDMLAAVADYDRARRWVRDNVTKYTFDGGVNIKFVAVGNEPFLRAYNGSFDHVTVPALRNIQRALDEAGHGAAVKATVPVNADVYDSPASNPVPSAGRFRSDVARVMADMVRFLNRSGAPLTVNIYPFLSLYGNDDFPLDYAFFDGGAGAPVVDGRAVYTNVFDANFDTLVSALKRVGLGHLPVMIGEVGWPTDGDRHATAALAERFYAGLLQRLAARRGTPLRPGARIEAYLFGLVDEDAKSVAPGNFERHWGIFTFDGRPKFPLDLRGDGRPAMPVPARGVEYLPRRWCVLNPISIAGDGRLADNVAYACSRADCTALGYGCSCGALDPRGNASYAFNAYYQAQGQVESACDFQGLAVVVDEDASQGACNFSVQLVGSGAPVATAVTTMAAVLVPLFLVLL

SEQ ID NO: 2837 - DNA, 1815 bp, Populus balsamifera subsp. trichocarpa
  misc_feature: Ceres Annot ID no. 1456572
  misc_feature: Encodes the peptide sequence at SEQ ID NO. 2838
atggagccttccatcaaggaaaagtgtagccaaaattctcaaaatgggaaccggctgctgcgaatggtggtgcattttgatctggctcagaccatggccagaaccgggctgctagtatggttatattgtttgattctggcatcagtcaatgttgttcacgtcctttcttcaacagtcttaccaggtataggcgtgaactggggcacgatggcgtcgaatccattgccgcgtaatatagtggttaacatgttgaaagacaatggcatcactaaggttaagcttttcgattctgattctccgaccttaaaggccttggctggcacaggcattgaggtcatggttggcatccctaataaccagatgtccatagtagccggtgatatagaggatgccgaagattgggtgaaagaaaatatcaccgcgtatcttcataatgggggtgttgacatcaaatatgtggctgttgggaatgagcctttcttgtcgagctataataacacatatgacaatattacattcccagcattgcaaaacgttcaaaaggctttggacaaagctggagtcggagacaaaatcaaagctacagttgctcttaatgctgatgtttatgaatccctttcggacaaaccgtccggtggtgatttccgtaaggacataaaggatatcatgattcagattatcaagtttctccatcaaaataaggctcccttcgttgttaacatttatccattccttagtctgtatcaaaacgctggcttccccttcgattatgccttctttgatggtggcaaaacaatctcggataaaaatgtttcatacagcaatgtgtttgatgcaaattacgatacactagtttggacgctgaagaagaatggtgttggtgatttgaagatcataattggggaagttggttggcctacagatggtaactttaatgctaacaacaaactagctaagaagttctatgacggtctcctaaaaaagttggtcgcagagaagggaacccctctccgaccaggccaattggatttgtatctctttggcctaattgacgagaatcagaagagcattgcaccaggacattttgagagacattggggactcttttactatgatggaaagccaaagtttccaatagatttatccggaaaaggcaacgacaagatgctaatagcagcaaagggagttcagtacatgtcacctcgatggtgtgtgcttaatgaggagaacaagaacttgagcatgatagcagatgaaatcagctatgcttgctcttcggctgattgcacaagcttgggttatggatcatcatgcagcaaaatggacattgatggcaatgtttcttatgcttttaatatgtacttccaaatgcaagatcaaggtgattatgcatgcaatttcaatggattagcaatgatagttaaaacaaatgcctctcggggaaactgtcttttcccattacagcttgtaggagctggagagaggctcgaattggcatatggagctcataataccaatttacagcattggtattcaaattacatcttgacaactatcctatactctccaatctgcaagaatttagaaaccaatctcttgctctccttttctgcaggggaggccccatctggactaaataggactgtcctgcttgtaatgaaacaaaccccaactaaaaccatcggatacgttcacgattgtccaaaattcattcgagataacaccattgtccaagacgctaaagtaaaatgtccccagaattttgcttctttcgatgcgatactttcgtctcctccaaactaccttcccttctag

SEQ ID NO: 2838 - protein, 573 aa, Populus balsamifera subsp. trichocarpa
  misc_feature (32)..(350): Pfam Name: Glyco_hydro_17 Pfam Description: Glycosyl hydrolases family 17
  misc_feature (371)..(454): Pfam Name: X8 Pfam Description: X8 domain
  misc_feature: Ceres Annot ID no. 1456572
  misc_feature: Bit score of 779.6 for HMM based on sequences of Figure 30
  misc_feature: Functional Homolog Of SEQ ID NO. 2748
MARTGLLVWLYCLILASVNVVHVLSSTVLPGIGVNWGTMASNPLPRNIVVNMLKDNGITKVKLFDSDSPTLKALAGTGIEVMVGIPNNQMSIVAGDIEDAEDWVKENITAYLHNGGVDIKYVAVGNEPFLSSYNNTYDNITFPALQNVQKALDKAGVGDKIKATVALNADVYESLSDKPSGGDFRKDIKDIMIQIIKFLHQNKAPFVVNIYPFLSLYQNAGFPFDYAFFDGGKTISDKNVSYSNVFDANYDTLVWTLKKNGVGDLKIIIGEVGWPTDGNFNANNKLAKKFYDGLLKKLVAEKGTPLRPGQLDLYLFGLIDENQKSIAPGHFERHWGLFYYDGKPKFPIDLSGKGNDKMLIAAKGVQYMSPRWCVLNEENKNLSMIADEISYACSSADCTSLGYGSSCSKMDIDGNVSYAFNMYFQMQDQGDYACNFNGLAMIVKTNASRGNCLFPLQLVGAGERLELAYGAHNTNLQHWYSNYILTTILYSPICKNLETNLLLSFSAGEAPSGLNRTVLLVMKQTPTKTIGYVHDCPKFIRDNTIVQDAKVKCPQNFASFDAILSSPPNYLPF

SEQ ID NO: 2839 - DNA, 1856 bp, Triticum aestivum
  misc_feature: Ceres Clone ID no. 940271
  misc_feature: Encodes the peptide sequence at SEQ ID NO. 2840
gccgacattgttccctgttcgactgaatctcgattcgattcgattcccgcctccgttcggatcggcaaatcttgaggcttcccctgttcctggattcccaaaccgtcgcatcgagagatcttctcccttctttcgtccgttcgccggagagcagagaggcctgttcaatggcggcggtgaatcttggagcgtggctctgcgcgctgctggcggcggtggcgggcgtcctcccggcggcggacgcgctggggatgaactggggcacgcaggccacgcacccgctctcgcccaggatcgtcgtgcagatgctcaaggacaacggcatcaagaaggtcaagctcttcgacgccgaccagggcaccctcaacgcgctcgccggctccgacatcgaggtcatggtcgccatccccaacaacctgctcgacctcatgaacgacaaggacaacgccagggactgggtgcgccacaacgtctcccgctaccacttcgacggcggcgtcaacatcaagtacgtggccgtcggcaatgagccctttttggcctcctacaacggcaccttcgacaaggtcaccttcccggcgctgcagaacatccagaacgcgctcaacgacgccggattcagcgagatcaaggccaccgtgccgctcaacgccgacgtctacaactcgcccgccaacaaccaggtgccgtcggcgggccgcttccggacggacgtcgccccgctcatgacgcagatggtgcagttcctggccaacaacagcgcccccttcaccgtcaacatctacccctacctcagcctctacctcagcgaggacttccccgtcgacttcgccttcttcgacggcctcgccaagccgctggtcgacggcgtcaacacttacaccaacgtgttcgacgccaacttcgacacgctggtgtcggcgctcgccgccgtcggccacggcgacttgcccatcgtcatcggcgaggtcggctggccgaccgacggcgacaagcacgccaccaacgccctcgccaagcgcttctacgacggcctgctgccgcggctggcggccaacaccggcacgccgctccggcccaaacagtacatggaggtctacctcttcgggctcctggacgaggacgtcaagagcgtggcgccgggcgcgttcgagcggcactggggcgtgctccgcttcgacggccagcccaagttccccatggacctcaccgggaacgggcagaacaccatgctggtgccggccaagggcgtgcagtacctgcccaagacgtggtgcgtgtacaaccccaacgccgaggacaagagcaagctggtggagaacgtgaactacgcctgcaccttcgccgactgcacggcgctcggcatgggctccagctgctacggcatggacgtgaacggcaacgcctcctacgccttcaacatgtacttccaggtgcagaaccaaaaggacgaggcgtgcgacttccaggcgctcgccgtccccacgcagaccgacccctccaccgccgcctgcagcttccccatacagatcgccgccgcctcctcgacgtcgggtggccaccggcgagcgcgcgccgggccgctcggcgccgccgctctgctcgtgctgctggctctggtccagctcttgatgtcgcattagagaatcaaacagacttgtttttcatcagttgatcatttgttgcctcatagcatatattttttggatcagcagtagttactagcagtaatccggtacgagtctttgtactggaggcatatataccggaggatatatgttcagatggcatttcacatgatgttcaaacacttgatgtgcttgatgactatggtgtacagttcattcagaatccct

SEQ ID NO: 2840 - protein, 491 aa, Triticum aestivum
  misc_feature (27)..(347): Pfam Name: Glyco_hydro_17 Pfam Description: Glycosyl hydrolases family 17
  misc_feature (368)..(451): Pfam Name: X8 Pfam Description: X8 domain
  misc_feature: Ceres Clone ID no. 940271
  misc_feature: Bit score of 777.8 for HMM based on sequences of Figure 30
  misc_feature: Functional Homolog Of SEQ ID NO. 2748
MAAVNLGAWLCALLAAVAGVLPAADALGMNWGTQATHPLSPRIVVQMLKDNGIKKVKLFDADQGTLNALAGSDIEVMVAIPNNLLDLMNDKDNARDWVRHNVSRYHFDGGVNIKYVAVGNEPFLASYNGTFDKVTFPALQNIQNALNDAGFSEIKATVPLNADVYNSPANNQVPSAGRFRTDVAPLMTQMVQFLANNSAPFTVNIYPYLSLYLSEDFPVDFAFFDGLAKPLVDGVNTYTNVFDANFDTLVSALAAVGHGDLPIVIGEVGWPTDGDKHATNALAKRFYDGLLPRLAANTGTPLRPKQYMEVYLFGLLDEDVKSVAPGAFERHWGVLRFDGQPKFPMDLTGNGQNTMLVPAKGVQYLPKTWCVYNPNAEDKSKLVENVNYACTFADCTALGMGSSCYGMDVNGNASYAFNMYFQVQNQKDEACDFQALAVPTQTDPSTAACSFPIQIAAASSTSGGHRRARAGPLGAAALLVLLALVQLLMSH

SEQ ID NO: 2841 - DNA, 1745 bp, Panicum virgatum
  misc_feature: Ceres Clone ID no. 1790079
  misc_feature: Encodes the peptide sequence at SEQ ID NO. 2842
aaagtgaagccagcatccattcacttcgtaacagtacccttgcgttatggtgccggccggccggtcggcgctggccgatccctcccttttaagcccgccggatccgggcgtttcttccccggctgtgggagacgagcgcgagagtctccaatggcggcgttccgctgcgttctcgcttcggttctcgtcgcggcggcggcgatggcggcagacgcgctcggggtgaactggggcacgatgtcgacgcgacggctgccgcccaaggtggtggcgcggctgctcgcggacaacgggttccggaaggtgaagatcttcgacgccgacgagcggaccatggcggggctcgccgggacgggcatcgagacgatggtcgccgtgcccaacgacctgctcgccgccgtcgccgactacgaccgcgccagggagtgggtgaaggagaacgtcaccaggtacgccttcgacggcggcgtcgacatcaggttcgtggccgtgggcaacgagccgttcctccgggcgtacaacggctcgttcgaccgcgtcaccgtgccggcgctgcgaaacatccagcgcgcgctcgacgaggccggccacggcggcagggtcaaggcgacggtccccgtgaacgcggacgtgtacgattcgccgccgggcgacccggtgccgtcggcggggaggttccgcgccgacgtggccggggtcatggccgagatggtgcgcttcctcagccgcagcggcgcgccgctgacggtcaacatctacccgttcctcagcctgtacgggaacgacgacttcccgctcgactacgccttcttcgacggcgccggcaaggcgaagccggtggtcgacggccgggtcacctacaccaacgtcttcgacgccaacttcgacaccctggtgtcggcgctgaagagggtcgggttcggccacctgccggtcatgatcggcgaggtcggctggccgacggacggcgaccggcacgccacgccggcgctggcggagcggttctacgcggggctgctccggcgcctcgcggcgaggaagggcacgccgctccggcccggcgcgcgcatcgaggcgtacctgttcgggctcatcgacgaggacgccaagagcgtggcaccgggcaacttcgagcgccactggggcctcttcaccttcgacggccggcccaagttctccctctccctccgcggcggcggcgggcgccccgcgatgcccgtcccggccaggggcgtcgagtacctgccccggcggtggtgcgtgctgaacccggacgccggcgacggcgccgcggcccgagtcgcggacaacgtcggctacgcgtgcggccgcgccgactgcacggcgctggggtacgggtgcagctgcggcggcgctctggacgcgcgcgggaacgcctcgtacgcgttcaacgcgtactaccaggcgcaggggcaggccgagtcggcgtgtgatttccaggggctcgccgtcgtcgtagacgaggacgcgtcgcggggcaagtgcaacttcagcgtgcaggtcgtcgggtcgggcgcgccggcggccgcagcggtggctgcggggacggcggccgtgctggcggctctgcttctcgtgttgctttgagcttacgcgaggtgtcaatgcgacggttgtagattgtaggacgtgacggcattaagatgttgtactaagtactttcgatcacatgagatgttttgggctcatatttgagagattatcagttcatatgtaagcccttc

SEQ ID NO: 2842 - protein, 485 aa, Panicum virgatum
  misc_feature (23)..(346): Pfam Name: Glyco_hydro_17 Pfam Description: Glycosyl hydrolases family 17
  misc_feature (368)..(454): Pfam Name: X8 Pfam Description: X8 domain
  misc_feature: Ceres Clone ID no. 1790079
  misc_feature: Bit score of 756.8 for HMM based on sequences of Figure 30
  misc_feature: Functional Homolog Of SEQ ID NO. 2748
MAAFRCVLASVLVAAAAMAADALGVNWGTMSTRRLPPKVVARLLADNGFRKVKIFDADERTMAGLAGTGIETMVAVPNDLLAAVADYDRAREWVKENVTRYAFDGGVDIRFVAVGNEPFLRAYNGSFDRVTVPALRNIQRALDEAGHGGRVKATVPVNADVYDSPPGDPVPSAGRFRADVAGVMAEMVRFLSRSGAPLTVNIYPFLSLYGNDDFPLDYAFFDGAGKAKPVVDGRVTYTNVFDANFDTLVSALKRVGFGHLPVMIGEVGWPTDGDRHATPALAERFYAGLLRRLAARKGTPLRPGARIEAYLFGLIDEDAKSVAPGNFERHWGLFTFDGRPKFSLSLRGGGGRPAMPVPARGVEYLPRRWCVLNPDAGDGAAARVADNVGYACGRADCTALGYGCSCGGALDARGNASYAFNAYYQAQGQAESACDFQGLAVVVDEDASRGKCNFSVQVVGSGAPAAAAVAAGTAAVLAALLLVLL

SEQ ID NO: 2843 - DNA, 1614 bp, Populus balsamifera subsp. trichocarpa
  misc_feature: Ceres Annot ID no. 1509765
  misc_feature: Encodes the peptide sequence at SEQ ID NO. 2844
atggagccttccatcaaggaaaagtgtagccaaaattctcaaaatgggaaccggctgctgcgaatggtggtgcattttgatctggctcagaccatggccagaaccgggctgctagtatggttatattgtttgattctggcatcagtcaatgttgttcacgtcctttcttcaacagtcttaccaggtataggcgtgaactggggcacgatggcgtcgaatccattgccgcgtaatatagtggttaacatgttgaaagacaatggcatcactaaggttaagcttttcgattctgattctccgaccttaaaggccttggctggcacaggcattgaggtcatggttggcatccctaataaccagatgtccatagtagccggtgatatagaggatgccgaagattgggtgaaagaaaatatcaccgcgtatcttcataatgggggtgttgacatcaaatatgtggctgttgggaatgagcctttcttgtcgagctataataacacatatgacaatattacattcccagcattgcaaaacgttcaaaaggctttggacaaagctggagtcggagacaaaatcaaagctacagttgctcttaatgctgatgtttatgaatccctttcggacaaaccgtccggtggtgatttccgtaaggacataaaggatatcatgattcagattatcaagtttctccatcaaaataaggctcccttcgttgttaacatttatccattccttagtctgtatcaaaacgctggcttccccttcgattatgccttctttgatggtggcaaaacaatctcggataaaaatgtttcatacagcaatgtgtttgatgcaaattacgatacactagtttggacgctgaagaagaatggtgttggtgatttgaagatcataattggggaagttggttggcctacagatggtaactttaatgctaacaacaaactagctaagaagttctatgacggtctcctaaaaaagttggtcgcagagaagggaacccctctccgaccaggccaattggatttgtatctctttggcctaattgacgagaatcagaagagcattgcaccaggacattttgagagacattggggactcttttactatgatggaaagccaaagtttccaatagatttatccggaaaaggcaacgacaagatgctaatagcagcaaagggagttcagtacatgtcacctcgatggtgtgtgcttaatgaggagaacaagaacttgagcatgatagcagatgaaatcagctatgcttgctcttcggctgattgcacaagcttgggttatggatcatcatgcagcaaaatggacattgatggcaatgtttcttatgcttttaatatgtacttccaaatgcaagatcaaggtgattatgcatgcaatttcaatggattagcaatgatagttaaaacaaatgcctctcggggaaactgtcttttcccattacagcttgtaggagctggagagaggctcgaattggcatatggagctcataataccaatttacagcattggtattgtaccttagcagccaattcaagacaattgttcttctgcaacacacgcagagaaaatgcttccaggtttggactttcgtaa

SEQ ID NO: 2844 - protein, 506 aa, Populus balsamifera subsp. trichocarpa
  misc_feature (32)..(350): Pfam Name: Glyco_hydro_17 Pfam Description: Glycosyl hydrolases family 17
  misc_feature (371)..(454): Pfam Name: X8 Pfam Description: X8 domain
  misc_feature: Ceres Annot ID no. 1509765
  misc_feature: Bit score of 781.0 for HMM based on sequences of Figure 30
  misc_feature: Functional Homolog Of SEQ ID NO. 2748
MARTGLLVWLYCLILASVNVVHVLSSTVLPGIGVNWGTMASNPLPRNIVVNMLKDNGITKVKLFDSDSPTLKALAGTGIEVMVGIPNNQMSIVAGDIEDAEDWVKENITAYLHNGGVDIKYVAVGNEPFLSSYNNTYDNITFPALQNVQKALDKAGVGDKIKATVALNADVYESLSDKPSGGDFRKDIKDIMIQIIKFLHQNKAPFVVNIYPFLSLYQNAGFPFDYAFFDGGKTISDKNVSYSNVFDANYDTLVWTLKKNGVGDLKIIIGEVGWPTDGNFNANNKLAKKFYDGLLKKLVAEKGTPLRPGQLDLYLFGLIDENQKSIAPGHFERHWGLFYYDGKPKFPIDLSGKGNDKMLIAAKGVQYMSPRWCVLNEENKNLSMIADEISYACSSADCTSLGYGSSCSKMDIDGNVSYAFNMYFQMQDQGDYACNFNGLAMIVKTNASRGNCLFPLQLVGAGERLELAYGAHNTNLQHWYCTLAANSRQLFFCNTRRENASRFGLS

SEQ ID NO: 2845 - protein, 492 aa, Oryza sativa subsp. japonica
  misc_feature (27)..(350): Pfam Name: Glyco_hydro_17 Pfam Description: Glycosyl hydrolases family 17
  misc_feature (371)..(458): Pfam Name: X8 Pfam Description: X8 domain
  misc_feature: Public GI ID no. 77551687
  misc_feature: Bit score of 768.9 for HMM based on sequences of Figure 30
  misc_feature: Functional Homolog Of SEQ ID NO. 2748
MAAATVWRCAVVVGVVIMAAAAVVDGLGVNWGTMATHRLPPKVMARLLKDNGFKKVKIFDADATTMSGLAGTGIEAMIAVPNDMLAAVGDYGRAREWVKENVTRYSFDGGVDIRYVAVGNEPFLKAYNGQFDRATVPALRNIQRALDEAGYGKRIKATVPVNADVYDSPASNPVPSAGRFRDDVAGTMADMVRFLNRSGAPLTVNIYPFLSLYGNDDFPLDYAFFDGGPPPRPVVDNGINYTNVFDANFDTLVSALKRIGFGSLPIVIGEVGWPTDGDKHATVPYAQRFYSGLLKRLAARRGTPLRPRARIEVYLFGLMDEDTKSVAPGNFERHWGIFTFDGRPKFPLDLRGAGRPAMPVPAKGVKYLPRRWCVLNPNVTDDDAGRLADNVGYACSHSDCTALGYGCSCGALDARGNASYAFNVYYQAQGQADAACDFQGLAVVTEDDRDVAQGACNFSVQVAAAALVGAAVAAAAAVACAAAVVAALLALV

SEQ ID NO: 2846 - protein, 492 aa, Oryza sativa subsp. japonica
  misc_feature (27)..(350): Pfam Name: Glyco_hydro_17 Pfam Description: Glycosyl hydrolases family 17
  misc_feature (371)..(458): Pfam Name: X8 Pfam Description: X8 domain
  misc_feature: Public GI ID no. 125577601
  misc_feature: Bit score of 765.8 for HMM based on sequences of Figure 30
  misc_feature: Functional Homolog Of SEQ ID NO. 2748
MAAATVWRCAVVVGVVIMAAAAVVDGLGVNWGTMATHRLPPKVMARLLKDNGFKKVKIFDADATTMSGLAGTGIEAMIAVPNDMLAAVGDYGRAREWVKENVTRYSFDGGVDIRYVAVGNEPFLKAYNGQFDRATVPALRNIQRALDEAGYGKRIKATVPVNADVYDSPASNPVPSAGRFRDDVAGTMADMVRFLNRSGAPLTVNIYPFLSLYGNDDFPLDYAFFDGGPPPRPVVDNGINYTNVFDANFDTLVSALKRIGFGSLPIVIGEVGWPTDGDKHATVPYAQRFYSGLLKRLAARRGTPLRPRARIEVYLFGLMDEDTKSVAPGNFERHWGIFTFDGRPKFPLDLRGAGRPAMPVPAKGVKYLPRRWCVLNPNVTDYDAGRLADNVGYACSHSDCTALGYGCSCGALDARGNASYAFNVYYQAQGQADAACDFQGLAVVTEDDRDVAQGACNFSVQVAAAALVGAAVAAAAAVACAAAVVAALLALV

SEQ ID NO: 2847 - protein, 494 aa, Oryza sativa subsp. indica
  misc_feature (29)..(352): Pfam Name: Glyco_hydro_17 Pfam Description: Glycosyl hydrolases family 17
  misc_feature (373)..(460): Pfam Name: X8 Pfam Description: X8 domain
  misc_feature: Public GI ID no. 125534858
  misc_feature: Bit score of 767.7 for HMM based on sequences of Figure 30
  misc_feature: Functional Homolog Of SEQ ID NO. 2748
MAAATAWRCVAAVVVGVVIMAAAAVVDGLGVNWGTMATHRLPPKVMARLLQDNGFKKVKIFDADATTMSGLAGTGIEAMIAVPNDMLAAVGDYGRAREWVKESVTRYSFDGGVDIRYVAVGNEPFLKAYNGEFDRATVPALRNIQRALDEAGYGKRIKATVPVNADVYDSPASNPVPSAGRFRDDVAGTMADMVRFLNRSGAPLTVNIYPFLSLYGNDDFPLDYAFFDGGPPPRPVVDNGINYTNVFDANFDTLVSALKRIGFGSLPIVIGEVGWPTDGDKHATVPYAQRFYSGLLKRLAARRGTPLRPRARIEVYLFGLMDEDTKSVAPGNFERHWGIFTFDGRPKFPLDLRGAGRPAMPVPAKGVKYLPRRWCVLNPNVTDDDAGRLADNVGYACSHSDCTALGYGCSCGALDARGNASYAFNVYYQAQGQADAACDFQGLAVVTEDDRDVAQGACNFSVQVAAAALAGAAVAADAAVACAAAVVAALLVLV

SEQ ID NO: 2848 - DNA, 2184 bp, Zea mays
  misc_feature: Ceres Clone ID no. 1551402
  misc_feature: Encodes the peptide sequence at SEQ ID NO. 2849
gttctcctcccggtttcgctcgcccccttcttcctcttccagctgctcatctgtcagccgttgcttgctcccgcgatcttcctctaccacacccacacacactccctatagccctagcgaaagcatcaaacacgctgttcggcgctgtcgttgcaaggtttggggttcttgctcgaaacgcagccctacctggcgacctattaatccctccctccttcccctgtatcggtctgtttccttcctcctcctcctcctccaaaagcagctcctttctcgggggttcggccacttccaggagttcttgcctgcgaagcttgctccgttctttcgcctgcttgccctcactcctctatcggcttggcctgcttattgcgcagacagtttctgcttgaccccacgattcttcactgacgattcacagaaagcttggcgagcacgtacgtacttgccgatcggacagttgatggacggcacgagcccaaaccgtacaagtccacaataatttctccctccggctccggctccggctccgcctagactcactcgtccatgtcgcgcgccggccgctccctgcccctgcccgtggcggcgctcctgctcgcggtggtggcgctgtgcgcggcgcggcgcgcgcgcgcgatcggcgtgaactggggcacgcagctgagccacccgctgccggcgagcacggtggtgcggatgctgcaggacaacggcttcgacagggtgaagctgttcgaggccgaggacgccatcctgggcgcgctcaggggctccggcctccaggtcatggtgggcatccccaacgacatgctcgccggcctggccgccggcggcaaggccgccgccgactgggtcgccaagaacgtctccgggcacgtccgcgacggcgtcgacataaggtacgtggccgtgggcaacgagccgttcctggagacgttcaacgggacgtacctgaacacgacgttcccggcgatgcagaacgtgcaggcggcgctggcgaaggccgggctggccgacagggtcaaggtgacggtgccgctgaacgcggacgtgtaccagtcgccgacggggaagccgtcggacggcgacttccgcgcggacatccacggcctcatgctgtccatcgtgcagttcctggcggccacgggcgcgccgttcgtggccaacgtgtaccccttcatcagcctgtacgcggaccccaacttcccgctcgactacgccttcttccagggctcgtcggcgcccgtggtcgacggcggcgtcacgtaccagaacaccttcgacgccaaccacgacacgctggtggccgcgctgcggcgcaacggcttcggcaacgtgtccgtcgtggtgggcgaggtgggctggcccacggacggcgacgccagcgccagcatcgactacgcgcgccgcttcaaccagggcttcctcgcgcacgtcgcgtccggccagggcacgccgctgcgcccgggccccctcgacgcctacctcttcagcctcgtcgacgaggaccgcaagagcatccagccgggcaacttcsagcgccactggggcctcttctactacgacggcacgcccaagtacccgctcagcctaggcggcaacgcctccacgctgatgaggcccggccaggggcgtcaagtacctggacaagaagtggtgcgtgctcaagacgtcggccaacctcgccgaccagaaggtgggcgacagcgtcggctacgcctgcggcctcgccgactgcaccagcctcggctacaagacctcctgcgccggcctcgacgccaagggcaacgtctcctacgcctacaacatgtactaccagaccatggaccaggacgaccgcgcctgcgacttcaacggcctcgccaccaccacctccgtcgacccgtccgccgggacatgccgcttcatcatcgagatcgacgtcggcgccgccgcgccacgctctgccatcgggctcgcggccgtgctggcagccgggctcgcggcctccgtgctatccgtgttgttgtgaaactcttcagtttccctcgtcgcgtcggtcgtcgtctgcgcgccttttgtcttcagctcgcctctggtgttggcaagagatttttttgacaagtgctactagtacctattaggttgttcaaaatgtatgtgttattgttaatttttttttttaataaaacgcattacaca

SEQ ID NO: 2849 - protein, 517 aa, Zea mays
  misc_feature (31)..(349): Pfam Name: Glyco_hydro_17 Pfam Description: Glycosyl hydrolases family 17
  misc_feature (366)..(449): Pfam Name: X8 Pfam Description: X8 domain
  misc_feature: Ceres Clone ID no. 1551402
  misc_feature: Bit score of 682.3 for HMM based on sequences of Figure 30
  misc_feature: Functional Homolog Of SEQ ID NO. 2748
  misc_feature (331)..(331): Xaa is any aa, unknown, or other
MSRAGRSLPLPVAALLLAVVALCAARRARAIGVNWGTQLSHPLPASTVVRMLQDNGFDRVKLFEAEDAILGALRGSGLQVMVGIPNDMLAGLAAGGKAAADWVAKNVSGHVRDGVDIRYVAVGNEPFLETFNGTYLNTTFPAMQNVQAALAKAGLADRVKVTVPLNADVYQSPTGKPSDGDFRADIHGLMLSIVQFLAATGAPFVANVYPFISLYADPNFPLDYAFFQGSSAPVVDGGVTYQNTFDANHDTLVAALRRNGFGNVSVVVGEVGWPTDGDASASIDYARRFNQGFLAHVASGQGTPLRPGPLDAYLFSLVDEDRKSIQPGNFXRHWGLFYYDGTPKYPLSLGGNASTLMRPGQGRQVPGQEVVRAQDVGQPRRPEGGRQRRLRLRPRRLHQPRLQDLLRRPRRQGQRLLRLQHVLPDHGPGRPRLRLQRPRHHHLRRPVRRDMPLHHRDRRRRRRATLCHRARGRAGSRARGLRAIRVVVKLFSFPRRVGRRLRAFCLQLASGVGKRFF

SEQ ID NO: 2850 - protein, 491 aa, Arabidopsis thaliana
  misc_feature (33)..(352): Pfam Name: Glyco_hydro_17 Pfam Description: Glycosyl hydrolases family 17
  misc_feature (373)..(457): Pfam Name: X8 Pfam Description: X8 domain
  misc_feature: Public GI ID no. 42563478
  misc_feature: Bit score of 761.1 for HMM based on sequences of Figure 30
  misc_feature: Functional Homolog Of SEQ ID NO. 2748
MNYRRKQSAITNSAVVFIIISAVCFLSGGVSGLGVNWGTMASHQLPPKTVVEMLKDNNIQKVKLFDADTNTMGALAGSGVEVMVAIPNDLLLAMGNYQRAKDWVQRNVSRFNFNNGVKIKYVAVGNEPFLTAYNGSFINLTYPALFNIQTALNEAGVGDFTKATVPLNADVYNSPPDNQVPSAGRFRSDIIQEMTQIVNFLAQNKAPFTVNIYPFLSLYLSSDFPFEYAFFDGQNTVNDNGVIYTNVFDASFDTLLASLNALNHGNMEVIVGEVGWPTDGDKNANVPNAERFYSGLLPRLANNVGTPMRKGYIEVYLFGFIDEDAKSVAPGNFERHWGIFKFDGQPKFPVDFRGQGQKKFLTGAQNVQYFLNQWCMFNPNGRGNMSRLGDNINYACSHSDCTALGYGSSCGNLDANGNASYAFNMYFQVQNQEAQACDFEGLATITTQNISQGQCNFPIQIGEPSSGHYDYSYGSMVRLCLVMSGLVFLLI

SEQ ID NO: 2851 - protein, 483 aa, Oryza sativa subsp. japonica
  misc_feature (33)..(349): Pfam Name: Glyco_hydro_17 Pfam Description: Glycosyl hydrolases family 17
  misc_feature (370)..(453): Pfam Name: X8 Pfam Description: X8 domain
  misc_feature: Public GI ID no. 125597725
  misc_feature: Bit score of 742.6 for HMM based on sequences of Figure 30
  misc_feature: Functional Homolog Of SEQ ID NO. 2748
MAPPPRLPAGAAALLLLLAVASRAAADGNAVDVGVNWGSQLSHPLLPKSVVQMLKENGILKVKLFDADPWPVGALVDSGIEVMLGIPNDMLETMNSYGNAQDWVKENVTSYGDKLKIKYVAVGNEPFLKAYNGSFMKTTFPALKNIQKALNEAGVGDKVKATVPLNADVYVSPDNKPSSGAFRPDIQGLMTDMVKFLHEHGSPFVVNIYPFLSLYQSDDFPFEFAFVDGGKTIQDKGGISYSNVFDANYDTLVTALKKAGVPSLKVVVGEVGWPTDGDKNANLKLARRYYDGLLKKLSKKEGTPLRPGKMDVYMFGLFDEDMKSILPGNFERHWGIFTYDGKPKFPMDLSGHGNDKPLAGVPGVEYLPKQWCVFDDGAEDKSKLPGNIQYACASGDCTALGYGCSCNGLDEKSNISYAFNMYYQMQDQDVRACDFDGLAKITTKNASARGCAFPIQIISAAAPAVAGVGLSAAALLALLMVLV

SEQ ID NO: 2852 - protein, 481 aa, Arabidopsis thaliana
  misc_feature (25)..(344): Pfam Name: Glyco_hydro_17 Pfam Description: Glycosyl hydrolases family 17
  misc_feature (365)..(448): Pfam Name: X8 Pfam Description: X8 domain
  misc_feature: Public GI ID no. 15217739
  misc_feature: Bit score of 761.6 for HMM based on sequences of Figure 30
  misc_feature: Functional Homolog Of SEQ ID NO. 2748
MSNLLALVVGFVIVIGHLGILVNGLGVNWGTMATHKLPPKTVVQMLKDNNINKVKLFDADETTMGALAGSGLEVMVAIPNDQLKVMTSYDRAKDWVRKNVTRYNFDGGVNITFVAVGNEPFLKSYNGSFINLTFPALANIQNALNEAGLGNSVKATVPLNADVYDSPASNPVPSAGRFRPDIIGQMTQIVDFLGKNNAPITINIYPFLSLYGNDDFPLNYAFFDGAEPINDNGIDYTNVFDANFDTLVSSLKAVGHGDMPIIVGEVGWPTEGDKHANAGSAYRFYNGLLPRLGTNKGTPLRPTYIEVYLFGLLDEDAKSIAPGPFERHWGIFKFDGQPKFPIDLSGQGQSKFLIGAQNVPYLPNKWCTFNPEAKDLTKLAANIDYACTFSDCTALGYGSSCNTLDANGNASYAFNMFFQVKNQDESACYFQGLATITTQNISQGQCNFPIQIVASSASSFSCSSYSLVVLIVWFLLSGMMF

SEQ ID NO: 2853 - protein, 500 aa, Arabidopsis thaliana
  misc_feature (39)..(360): Pfam Name: Glyco_hydro_17 Pfam Description: Glycosyl hydrolases family 17
  misc_feature (381)..(464): Pfam Name: X8 Pfam Description: X8 domain
  misc_feature: Public GI ID no. 15230097
  misc_feature: Bit score of 748.1 for HMM based on sequences of Figure 30
  misc_feature: Functional Homolog Of SEQ ID NO. 2748
MAGERSKLTTNHFYNHQIILCYFLIISQVSIASSNTSNVGVNWGIMASHQLPPEKVVKMLMDNSFTKLKLFEADQNILDALIGSDIEVMIGIPNRFLKEMAQDTSVAASWVEENVTAYSYNGGVNIKYIAVGNEPFLQTYNGTYVEFTLPALINIQRALEEADLKNVKVTVPFNADIYFSPEANPVPSAGDFRPELRDATIEIINFLYSHDSPFTVNIYPFLSLYGNAYFPLDFAFFDGTNKSLRDGNLVYTNVFDANLDTLICAMERYSFLGMKIIVGEVGWPTDGDKNANVKSAKRFNQGMVKHAMSGNGTPARKGVIMDVYLFSLVDEDAKSIAPGTFERHWGIFEFDGRPKYELDLSGKGNDKPLVPVEDVKYLPKTWCILDPNAYNLDDLPDNIDYACSLSDCTALGYGSSCNHLTATGNVSYAFNMYYQMHDQKTWDCDFLGLGLITDEDPSDELCEFPVMIDTGDSTRLQPGSSRVLTRVAAAVLVMLVLPIL

SEQ ID NO: 2854 - DNA, 1821 bp, Zea mays
  misc_feature: Ceres Clone ID no. 445269
  misc_feature: Encodes the peptide sequence at SEQ ID NO. 2855
acacacgactacacgagtacacgacgccgcgaagaaatctctccacgcccacggcctgacggccacgctcctcgcctgcttcgccgatgccagcgcactcctcccaccttctctcccgcaacccgtagccccacgacagcctccccctccccttccacctccgatcccatggcaccgcgccccgccgccgcagttttcgtcgttgccgccgtggtggtcctgctccctcctcccgcggcggcggcggcgccccccgtgggggtaaactggggcaccatgatgtcgcaccccatccacccatctgcggtggtcgagatgctgcgcgccaacggggtcgaccgggtgaagctcttcgacgccgacccctggacggtctccgcgctcgccgggtcaggcgtccaggccatgctcgccgcgcccaacgaccagctcgcctccctggcccgcgacccgcgccgcgcgcgcgactgggtccgccaaaacgtcaccgccaacatcaacgccggcgtcgacgtcaggtatgtggctgttggcaatgaaccttttctgaagagctataatggcagcttcatcaacattacctttccagcactcaagaacatgcagagggctatagatgaggctggctttggccaacacatcaaagtagttgtgccattgaatgctgatatctacagctcccctgagaacaagccagtgccatctgctgggactttccgcaaggatatcaataccctcatggttgacattgttaattacctccatgcaaatgatgcaccctttgtggttaacatctacccatttctcagcctatatcagaatcccaactttccgctgaatttctccttctttgatggcgctaccaagccagtgtatgatcaaggaatggtctacaccaatgtgtttgatgccaactttgatactcttgtctggtcattaaggaaagctggtgtgcccgacatgagaatcattgttggtgaagttggctggccatctgatggtgataagaatgctaacaccaaatatgcacagaggttctataatggttttctgaagaaaatgacaaaaaatgtcggcacgcctctgagacctggtcgtatggaagtttacctgtttgcgctgattgatgagaaccagaagagtgtcctgcctggacgctttgagcgtcactggggactattcacatatgatggaaaaccaaagttctctatggatctcagtggaaatggcaagggcagtgtagctgaagtgaaaggggtgcagtacttgccaccacaatggtgtgtattcaacaaggatacaaaggataagtacaaagatctgccagcctctgtaaactatgcatgctcaaatgcagattgtacaccactggggtatgggtcctcatgcaatggtctcagccatgatgggaacatatcatatgcattcaacatctatttccagacaatggatcaggatgtcagggcttgttcttttggaggccttgcaaagatcacaacgacaaatgcttcacaaggagggtgcttgtttccagtacagattacgagtgcttcagtaacagtggtgccactgatatttttgcctatgctagtctctgtgatcactctactatagacatggaaggctagtagtaagcactgaaatattaggttactgaagcaggaataggtttgcacatgacacaggaaagaagagtcacccaagataaagttgacgaggaagacaaattgtcgaactcgaaccgagtcgttttctctgtgctactggcactagtaacatacctgtattaactttggacagtgggaaagctaaaattttgac

SEQ ID NO: 2855 - protein, 481 aa, Zea mays
  misc_feature (30)..(350): Pfam Name: Glyco_hydro_17 Pfam Description: Glycosyl hydrolases family 17
  misc_feature (370)..(454): Pfam Name: X8 Pfam Description: X8 domain
  misc_feature: Ceres Clone ID no. 445269
  misc_feature: Bit score of 721.6 for HMM based on sequences of Figure 30
  misc_feature: Functional Homolog Of SEQ ID NO. 2748
MAPRPAAAVFVVAAVVVLLPPPAAAAAPPVGVNWGTMMSHPIHPSAVVEMLRANGVDRVKLFDADPWTVSALAGSGVQAMLAAPNDQLASLARDPRRARDWVRQNVTANINAGVDVRYVAVGNEPFLKSYNGSFINITFPALKNMQRAIDEAGFGQHIKVVVPLNADIYSSPENKPVPSAGTFRKDINTLMVDIVNYLHANDAPFVVNIYPFLSLYQNPNFPLNFSFFDGATKPVYDQGMVYTNVFDANFDTLVWSLRKAGVPDMRIIVGEVGWPSDGDKNANTKYAQRFYNGFLKKMTKNVGTPLRPGRMEVYLFALIDENQKSVLPGRFERHWGLFTYDGKPKFSMDLSGNGKGSVAEVKGVQYLPPQWCVFNKDTKDKYKDLPASVNYACSNADCTPLGYGSSCNGLSHDGNISYAFNIYFQTMDQDVRACSFGGLAKITTTNASQGGCLFPVQITSASVTVVPLIFLPMLVSVITLL

SEQ ID NO: 2856 - protein, 488 aa, Arabidopsis thaliana
  misc_feature (30)..(347): Pfam Name: Glyco_hydro_17 Pfam Description: Glycosyl hydrolases family 17
  misc_feature (368)..(455): Pfam Name: X8 Pfam Description: X8 domain
  misc_feature: Public GI ID no. 15238768
  misc_feature: Bit score of 746.5 for HMM based on sequences of Figure 30
  misc_feature: Functional Homolog Of SEQ ID NO. 2748
MSNRRKQSTTAGIFLCITIVSLLSGDVSALGVNWGTMSTHQLPPKTVVQMLKDNNVKKVKLFDADTNTMVALAGSGIEVMVAIPNDQLKAMGSYNRAKDWVRRNITRFNDDVKIKYVAVGNEPFLTAYNGSFINLTYPALFNIQKALNEAGVGDFIKATVPLNADVYNSPLENPVPSAGSFRQDIFEEMKLIVNFLAHNKAPFTVNIYPFLSLYLSSDFPFDYAFFNGQNTVSDNGVIYTNVFDANFDTLLASLKALGHGDMTVIVGEVGWPTDGDKNANIPNAERFYTGLLPKLAANRGTPMRPGYIEVYLFGFIDEDAKSIAPGNFERHWGIFKYDGQPKFPADLSGAGQKKILTGAQNVQYLRNQWCMFNPNALTFSNNTNQLGDNVNYACTFSDCTALGYGSSCGNLDEVGNASYAFNMYFQVQNQKAEACDFEGLAIITTRNISREQCNFPIQIGDPTSGHSDHNHRFISFSLVSMLLLFTAL

SEQ ID NO: 2857 - protein, 488 aa, Oryza sativa subsp. japonica
  misc_feature (33)..(353): Pfam Name: Glyco_hydro_17 Pfam Description: Glycosyl hydrolases family 17
  misc_feature (372)..(456): Pfam Name: X8 Pfam Description: X8 domain
  misc_feature: Public GI ID no. 115465107
  misc_feature: Bit score of 713.5 for HMM based on sequences of Figure 30
  misc_feature: Functional Homolog Of SEQ ID NO. 2748
MAAAAAAVGVVALLLLLPLAASAYGDGLGRAAVGVNWGTMTSHPILPCEVVRMLAANGVARVKMFDADPWTAAPLAHTGIQVMLAVPNDQLARLAGDPRRAYRWAEQNVSAYLEAGVDVRYVAVGNEPFLKSYNGSLINVTFPALKNMQRALDKLGLGDHVKAVVPLNADVYNSPENKPVPSAGSFRKDINALMVDIVNFLNMNNAPFVVNIYPFLSLYQNPNFPLNFSFFDGGSKPVYDKGVVYTNVFDANFDTLVWSLRKAGVPDMKIIVGEVGWPTDGDKHANVRYAQKFYDGFLKKMVRNIGTPLRPGWMEVYLFALIDENQKSVLPGRFERHWGLLTYDGKPKFSMDLSGDGLDNLVGVEVEYLPAQWCVFNKDAKDKFKDLPAAVNYACSNADCTPLGYGSSCNNLSHDGNISYAFNIYFQTMDQDVRACSFEGLAKITTINASQGGCLFPVQILSASERVVPLRFLPTSFLILLMVVSILT

SEQ ID NO: 2858 - protein, 450 aa, Arabidopsis thaliana
  misc_feature (1)..(313): Pfam Name: Glyco_hydro_17 Pfam Description: Glycosyl hydrolases family 17
  misc_feature (334)..(417): Pfam Name: X8 Pfam Description: X8 domain
  misc_feature: Public GI ID no. 5042412
  misc_feature: Bit score of 687.6 for HMM based on sequences of Figure 30
  misc_feature: Functional Homolog Of SEQ ID NO. 2748
MATHKLPPKTVVQMLKDNNINKVKLFDADETTMGALAGSGLEVMVAIPNDQLKVMTSYDRAKDWVRKNVTRYNFDGGVNITFVAVGNEPFLKSYNGSFINLTFPALANIQNALNEAGLGNSVKATVPLNADVYDSPASNPVPSAGRFRPDIIGQMTQIVDFLGKNNAPITINIYPFLSLYGNDDFPLNYAFFDGAEPINDNGIDYTNVFDANFDTLVSSLKAVGHGDMPIIVGEVGWPTEGDKHANAGSAYRFYNGLLPRLGTNKGTPLRPTYIEVYLFGLLDEDAKSIAPGPFERHWGIFKFDGQPKFPIDLSGQGQSKFLIGAQNVPYLPNKWCTFNPEAKDLTKLAANIDYACTFSDCTALGYGSSCNTLDANGNASYAFNMFFQVKNQDESACYFQGLATITTQNISQGQCNFPIQIVASSASSFSCSSYSLVVLIVWFLLSGMMF

SEQ ID NO: 2859 - protein, 492 aa, Zea mays
  misc_feature (28)..(348): Pfam Name: Glyco_hydro_17 Pfam Description: Glycosyl hydrolases family 17
  misc_feature (367)..(449): Pfam Name: X8 Pfam Description: X8 domain
  misc_feature: Public GI ID no. 194705838
  misc_feature: Bit score of 729.9 for HMM based on sequences of Figure 30
  misc_feature: Functional Homolog Of SEQ ID NO. 2748
MAAGGPALLRALLVAALCAVPWRAEAAIGVNWGTVSNHRAPPGVVVDLMRANRISKVKLFNADPGVLRALAGSGIQVMVGVTNDELASIAGSQAAADDWVAQNVSRYVGRSGVDIRYIAVGNEPFLTSYQGQFQSYIIPAMTNIQQSLVKANLASYVKLVVPCNADAYQSASVPSQGVFRTELTQLMTQLAAFLSSSGAPFVVNIYPFLSLYQNSDFPQDYAFFEGSTHPVVDGPNVYYDAFDGNFDTLVSALSKIGYGNLPIAIGEIGWPTEGAPSANLTAARAFNQGLINRITSNKGTPLRPGVPPADVYLFSLLDEEGKSILPGNFERHWGIFSFDGQAKYPLNLGLGNSVLKNAKEVPYLPSRWCVANPARDLDSVSDHMKLACSMADCTTLYYGGSCYGIGEKGNVSYAFNSYYQQQKQDPKSCDFGGLGMITYLDPSMGECRFLVGVDDSKSSAVASCGGGCCGVCCGLWVLALWVLTYLRMMGSA

SEQ ID NO: 2860 - DNA, 1566 bp, Populus balsamifera subsp. trichocarpa
  misc_feature: Ceres Annot ID no. 1533786
  misc_feature: Encodes the peptide sequence at SEQ ID NO. 2861
atgtcaagattgtcaggaactctgctttgtcttgtgctagcaatcatactactatcagggtcatttccagtgggagaatcagcaataggagtcaactgggggacaatctcatttcacaggttgaagccctcaactgtggtggatctgttgaaagacaacaagataaagagagtgaagttgttcgatgcagacccaggttcgcttactgctttaatggggagtgggattgaagtcatggttgggattcctaatgagatgttggctgctcttagctcttcaactgatgcttctgatttgtgggttaggcaaaatgtgtctagatatgttgttaaaggtggtgctgatataaggtacgttgctgtaggaaatgaaccattcctcacaagttattcaggtcaatttcaatcttttgttgtccctgctctgctcaatctacaacagtctctggtgaaagcaaatctagctggttatgtaaagctagtagttccttgcaatgctgatgcttatgagtcttctcttccttctcaaggggcattccgacctgaactaactcagattatgactcaacttgtgtccttcctcaactcaaacggctcaccttttgttgtgaatatctacccgtttcttagcctttatgggaactcagattttccacaagactatgcattctttgaggggagtacccatcctgttacagatgggtctaatgtctactacaatgcttttgatgggaatttcgacactttagttgcagcgctcaacaaacttggatatggtcaaatgcccattgttattggcgaggtgggttggccaactgatggagccattggcgccaacctcactgcagcaagggttttcaaccagggacttataaaacatgtattgagtaacaaaggaacccctctgagaccagatgcccctcccatggatatttatcttttcgctctgcttgatgaaggagcaaagagtgtactcccaggaaactttgaaagacactgggggattttctcgtttgatggccaggctaaatatgcactgaaccttggtttgggtaacaagttactgaagaatgcaaagaatgtcgagtatctcccatcaaggtggtgtgtggcagacccctcaaaagatctaacaagtgtagccaaccacctgagaatagcctgcagtgctgctgattgcacaacacttaattatggcggatcttgcaatgaaattggggcaaaaggaaacatctcatatgcattcaacagttactatcagctccagatgcaaaatgcacaaagctgtgatttcgatgggcttggtatggtgacatttctagacccatcagttggtgattgcaggttccctgttggagtgaatgatcataagagttcattagctttcagatcatgtcataggtggaccaccatttggacttctatcctagggggggtgtggcatgtcaagtttagtagaaattcccattgcatcagcagcagcgccaaccttcaaataaacatgaatgatgcttacctcgtgagtacaacaagatcaaaagtaaacagaatcaacaataaaccatga

SEQ ID NO: 2861 - protein, 521 aa, Populus balsamifera subsp. trichocarpa
  misc_feature (29)..(348): Pfam Name: Glyco_hydro_17 Pfam Description: Glycosyl hydrolases family 17
  misc_feature (367)..(449): Pfam Name: X8 Pfam Description: X8 domain
  misc_feature: Ceres Annot ID no. 1533786
  misc_feature: Bit score of 740.6 for HMM based on sequences of Figure 30
  misc_feature: Functional Homolog Of SEQ ID NO. 2748
MSRLSGTLLCLVLAIILLSGSFPVGESAIGVNWGTISFHRLKPSTVVDLLKDNKIKRVKLFDADPGSLTALMGSGIEVMVGIPNEMLAALSSSTDASDLWVRQNVSRYVVKGGADIRYVAVGNEPFLTSYSGQFQSFVVPALLNLQQSLVKANLAGYVKLVVPCNADAYESSLPSQGAFRPELTQIMTQLVSFLNSNGSPFVVNIYPFLSLYGNSDFPQDYAFFEGSTHPVTDGSNVYYNAFDGNFDTLVAALNKLGYGQMPIVIGEVGWPTDGAIGANLTAARVFNQGLIKHVLSNKGTPLRPDAPPMDIYLFALLDEGAKSVLPGNFERHWGIFSFDGQAKYALNLGLGNKLLKNAKNVEYLPSRWCVADPSKDLTSVANHLRIACSAADCTTLNYGGSCNEIGAKGNISYAFNSYYQLQMQNAQSCDFDGLGMVTFLDPSVGDCRFPVGVNDHKSSLAFRSCHRWTTIWTSILGGVWHVKFSRNSHCISSSANLQINMNDAYLVSTTRSKVNRINNKP

SEQ ID NO: 2862 - protein, 468 aa, Medicago truncatula
  misc_feature (7)..(328): Pfam Name: Glyco_hydro_17 Pfam Description: Glycosyl hydrolases family 17
  misc_feature (347)..(429): Pfam Name: X8 Pfam Description: X8 domain
  misc_feature: Public GI ID no. 124360899
  misc_feature: Bit score of 717.9 for HMM based on sequences of Figure 30
  misc_feature: Functional Homolog Of SEQ ID NO. 2748
MASESAIGVNWGTLSSHRLKPSTVVNLLRDNKISKVKLFEADPAILKALMGSAIQVMVGIPNEMLSLLGGSSVAADYWVQRNVSAFMTKGGADIRYIAVGNEPFLTSYNGQFINLVIPAITNIQQSLVKANLAGYVKIVVPCNADAYESSGGLPSQGVFRSELTQIITQLVQFLNSNGSPFVVNIYPFLSLYDNGDFPGDYAFFQGTTHAVTDGSNVYTNAFDGNYDTLVSALGKLGYGQMPIVIGEIGWPSDGAIGANITAARVFNQGLVYHIASNKGTPLRPNVPPMDVYLFGLFDEGAKSTLPGNFERHWGIFSFDGQAKYSLNLGLGNKELRNARNVEYLPSRWCVANPLSDLTNVVNHMKIACSVADCTTLNYGGSCNEIGEKGNISYAFNSFYQLRMQDSQSCEFDGLGMVTFLDPSVGDCHFLVGVIDRGLNKDSSACQKTYQWLVIVLLLILHGTFFLSM

SEQ ID NO: 2863 - protein, 499 aa, Oryza sativa subsp. japonica
  misc_feature (36)..(356): Pfam Name: Glyco_hydro_17 Pfam Description: Glycosyl hydrolases family 17
  misc_feature (375)..(457): Pfam Name: X8 Pfam Description: X8 domain
  misc_feature: Public GI ID no. 115475910
  misc_feature: Bit score of 698.4 for HMM based on sequences of Figure 30
  misc_feature: Functional Homolog Of SEQ ID NO. 2748
MAAANAGAMVRFVAAFLAAVLVMMVPCAPRAAAAAVGVNWGTVSAHRMPAPVVVELMRANRIGRVKLFDADQAALRALMGSGLQVMVGITNEMLQGIAASPAAADAWVARNVSRYVGPGGADIRYIAVGNEPFLTSYQGQFQSYVLPAMTNIQQSLVKANLARYIKLVVPCNADAYQSASVPSQGVFRPDLIQIITQLAAFLSSSGAPFVVNIYPFLSLYQSSDFPQDYAFFDGSSHPVVDGPNVYYNAFDGNFDTLVSALSKIGYGQLPIAIGEVGWPTEGAPSANLTAARAFTQGLISHVLSNKGTPLRPGVPPMDVYLFSLLDEEQKSTLPGNFERHWGVFSFDGQAKYPLNLGLGSPVLKNAKDVPYLPPRWCVANPGRDLNNVENHLKLACTMADCTTLYYGGSCNAIGEKGNISYAFNSYYQLRKQDAQSCDFDGLGMITYLDPSIGDCRFLVGIDDSRTSTIYSSGDCSRRRFGLWILAFLVIGFLQIGVYL

SEQ ID NO: 2864 - protein, 499 aa, Oryza sativa subsp. indica
  misc_feature (36)..(356): Pfam Name: Glyco_hydro_17 Pfam Description: Glycosyl hydrolases family 17
  misc_feature (375)..(457): Pfam Name: X8 Pfam Description: X8 domain
  misc_feature: Public GI ID no. 125561098
  misc_feature: Bit score of 698.6 for HMM based on sequences of Figure 30
  misc_feature: Functional Homolog Of SEQ ID NO. 2748
MAAANAGAMVRFVAAFLAAVLVMMVPCAPRAAAAAVGVNWGTVSAHRMPAPVVVELMRANRIGRVKLFDADQAALRALMGSGLQVMVGITNEMLQGIAASPAAADAWVARNVSRYVGPGGADIRYIAVGNEPFLTSYQGQFQSYVLPAMTNIQQSLVKANLARYIKLVVPCNADAYQSASVPSQGVFRPDLIQIITQLAAFLSSSGAPFVVNIYPFLSLYQSSDFPQDYAFFDGSSHPVVDGPNVYYNAFDGNFDTLVSALSKIGYGQLPIAIGEVGWPTEGAPSANLTAARAFTQGLISHVLSNKGTPLRPGVPPMDVYLFSLLDEEQKSTLPGNFERHWGVFSFDGQAKYPLNLGLGSPVLKNAKDVPYLPPRWCVANPGRDLNNVENHLKLACTMADCTTLYYGGSCNAIGEKGNISYAFNSYYQLRKQDAQSCDFDGLGMITYLDPSIGDCRFLVGIDDSRTSTIYSSGDCSQRRFGLWILAFLVIGFLQIGVYL

SEQ ID NO: 2865 - DNA, 1701 bp, Arabidopsis thaliana
  misc_feature: Ceres Annot ID no. 887555
  misc_feature: Encodes the peptide sequence at SEQ ID NO. 2866
aagacacgaaaaagaattttaccgactggaagaagaaaaaacatcaaccagacaaaagaaaagaaaacaaaaacacatcttcgagatcaaacaaaccctaattatcatccatcgtcgccttctcaatatatatggccggaagagcagcgatgctcgttaacgtcgggacggttataatgaccgttttgaccctggctagtttggtcggaggcttcggtgtgaattggggcaatatcgcatcacatccgttgaatcccaacattgttgttcagatgcttaaggacaataagatcaataaagtgaagctttttgacgctgattcatggacgatgaatgctttggctggtacgggcatggaggttatggttggaatccctaataaccttcttgagtctctcgcagatgattacgataatgctaaagattgggttaaagaaaacgtgacccagtatattcgtaagggtggcgtcgacatcaagtacgtagccgtggggaacgagccgtttttgtctgcatacaacggatcgttcttgaagacaacatttccagcgttaaagaacattcacaaggcgttaaaagaagctggacacaccaatataatgaaagccacgatcccacaaaacgcagaagtttaccaatcagccaacgacaagccatcagaaggtgatttccgcaaggatgtcaaacaaacgatgcttgatatcgtcaatttcttccacgaaaacgacttacctttcaccgtcaacatttaccctttccttagtctttacctaaacgagcattttcccgttgagttcgcttttcttgacggtgatggtcagacaatgactgacaaaggaaagaattatgataacgtgtttgacgccaattacgacacacttgtttacgcgttgaagaaggctgggattcacgatatgaagattatcgttggagaggttggatggccaacggatggtcacaaatatgcatcgccgaagctagcggagaaattctatgcagggcttatgaaaagacttgctaaggacggtgggactccaacgaggcctgaaagattagaggtctatctcttcggtttcctcgacgaagacatgaagagtattcttccagggccttttgagagacattggggaatctttagatacgatgggacaccaaagtttatgctagatttcacgggacaaggacgccaaatggtgcccgttgcagctaaaggtgtgcagtacttggaaaaacaatggtgcgtagtgaacaaagacacggtcaatctagacgaagttggtcctgatctagactatgcgtgttaccacggggactgcaccgcgatggaagccgggtcaacttgtagtaagctaaccaaagtccaaaacatatcatacgcatttaacatgtatttccagatacaagaccaagacgttagggcttgcgatttcaaaggagctgcaatgatcaccaaggtcaatgcatccgtgggaagttgcttgttccctgttcagatcgttagtggaagtgatgatttcaggatcaactttgtgttcggaagattcgtcgtctttggacttgttcttcttggattgctcacggttatataatttgtttttttgttgttgtttggttttctttttgcaatttggagggatttattcgacacgattaattgttatttgttattcgttttaaaaatgtttacttttgagttagttc

SEQ ID NO: 2866 - protein, 485 aa, Arabidopsis thaliana
  misc_feature (28)..(347): Pfam Name: Glyco_hydro_17 Pfam Description: Glycosyl hydrolases family 17
  misc_feature (368)..(451): Pfam Name: X8 Pfam Description: X8 domain
  misc_feature: Ceres Annot ID no. 887555
  misc_feature: Bit score of 730.2 for HMM based on sequences of Figure 30
  misc_feature: Functional Homolog Of SEQ ID NO. 2748
MAGRAAMLVNVGTVIMTVLTLASLVGGFGVNWGNIASHPLNPNIVVQMLKDNKINKVKLFDADSWTMNALAGTGMEVMVGIPNNLLESLADDYDNAKDWVKENVTQYIRKGGVDIKYVAVGNEPFLSAYNGSFLKTTFPALKNIHKALKEAGHTNIMKATIPQNAEVYQSANDKPSEGDFRKDVKQTMLDIVNFFHENDLPFTVNIYPFLSLYLNEHFPVEFAFLDGDGQTMTDKGKNYDNVFDANYDTLVYALKKAGIHDMKIIVGEVGWPTDGHKYASPKLAEKFYAGLMKRLAKDGGTPTRPERLEVYLFGFLDEDMKSILPGPFERHWGIFRYDGTPKFMLDFTGQGRQMVPVAAKGVQYLEKQWCVVNKDTVNLDEVGPDLDYACYHGDCTAMEAGSTCSKLTKVQNISYAFNMYFQIQDQDVRACDFKGAAMITKVNASVGSCLFPVQIVSGSDDFRINFVFGRFVVFGLVLLGLLTVI

SEQ ID NO: 2867 - protein, 488 aa, Oryza sativa subsp. japonica
  misc_feature (25)..(345): Pfam Name: Glyco_hydro_17 Pfam Description: Glycosyl hydrolases family 17
  misc_feature (364)..(446): Pfam Name: X8 Pfam Description: X8 domain
  misc_feature: Public GI ID no. 115478288
  misc_feature: Bit score of 723.7 for HMM based on sequences of Figure 30
  misc_feature: Functional Homolog Of SEQ ID NO. 2748
MGAFAAALLALLLAAMAAPPAEAAVGVNWGTLSSHRVPPPVVVDLLRANRIGKVKLFDADPAVLRALAGSGLQVMVGVTNAELAAVAGSPAAADAWVAQNVSRYVGRGGVDIRYIAVGNEPFLTSYQGQFQSYVIPAMTNIQQSLVKANLASYVKLVVPCNADAYQSASLPSQGVFRTELTQIMTQLAAFLSSSGAPFVVNIYPFLSLYQSSDFPQDYAFFEGSTHPVVDGPNTYYNAFDGNFDTLVAALGKIGYGQLPIAIGEVGWPTEGAPSANLTAARAFNQGLMNRVMNNKGTPLRPGVPPADVYLFSLFDEEQKSILPGNFERHWGIFSFDGQAKYPLNLGLGNPVLKNAREVPYLPSRWCIANPAQNLDNVANHLKLACSMADCTTLDYGGSCYGIGEKANVSYAFNSYYQQQKQDAKSCDFDGNGMITYLDPSMGECRFLVGIDDSKSSAVSSCGCGCGVCCGVWVLFFWVFMYLRMMGSV

SEQ ID NO: 2868 - protein, 498 aa, Vitis vinifera
  misc_feature (6)..(325): Pfam Name: Glyco_hydro_17 Pfam Description: Glycosyl hydrolases family 17
  misc_feature (344)..(426): Pfam Name: X8 Pfam Description: X8 domain
  misc_feature: Public GI ID no. 147845562
  misc_feature: Bit score of 696.5 for HMM based on sequences of Figure 30
  misc_feature: Functional Homolog Of SEQ ID NO. 2748
MAESGIGVNWGTLSLHKLSPSTVVDLFKQNKIEKVKLFDADPYCLNALRGSGIQVMVGIPNEMLSVFSSSTDACDLWVSQNLSRYMGKGGVDIRYVAVGNEPFLTSYSGQFQSYVVPALLNLQQSLAKANVANFVKLVVPCNADAYESSLPSQGAFRSELTQIMTQIVSFLNTNGSPFVVNIYPFLSLYGNSDFPQDYAFFGGTNHAVTDGANVYYNAFDGNFDTLVAALNKLGYGQMPIVIGEVGWPTDGAISANLTAAKAFNQGLINHVLSNKGTPLRPGVPPMDIYLFSLLDEEAKSILPGTFERHWGIFSFDGQAKYPLNLGLGNGLLKNARDVEYLPSRWCVANPSRDLSGVANHMKIACSNADCTTLNYGGSCNEIGAKGNISYAFNSYYQVKKQNSQSCDFDGLGIVTFLDPSVGDCRFLVGITDNFCLMRSFMEWESLCTGITDGMEKLLHFLDYDENMTEFLENDHELMEGEGDIDMGYYGDSSEPLTV

SEQ ID NO: 2869 - protein, 487 aa, Vitis vinifera
  misc_feature (38)..(352): Pfam Name: Glyco_hydro_17 Pfam Description: Glycosyl hydrolases family 17
  misc_feature (371)..(453): Pfam Name: X8 Pfam Description: X8 domain
  misc_feature: Public GI ID no. 157329499
  misc_feature: Bit score of 721.0 for HMM based on sequences of Figure 30
  misc_feature: Functional Homolog Of SEQ ID NO. 2748
MILDLVFQAKMAQTHFTAAAFLVLVLISSSVLMAESGIGVNWGTLSLHKLSPSTVVDLFKQNKIEKVKLFDADPYCLNALRGSGIQVMVGIPNEISSTDACDLWVSQNLSRYMGKGGVDIRYVAVGNEPFLTSYSGQFQSYVVPALLNLQQSLAKANVANFVKLVVPCNADAYESSLPSQGAFRSELTQIMTQIVSFLNTNGSPFVVNIYPFLSLYGNSDFPQDYAFFGGTNHAVTDGANVYYNAFDGNFDTLVAALNKLGYGQMPIVIGEVGWPTDGAISANLTAAKAFNQGLINHVLSNKGTPLRPGVPPMDIYLFSLLDEEAKSILPGTFERHWGIFSFDGQAKYPLNLGLGNGLLKNARDVEYLPSRWCVANPSRDLSGVANHMKIACSNADCTTLNYGGSCNEIGAKGNISYAFNSYYQVKKQNSQSCDFDGLGIVTFLDPSVGDCRFLVGITDSSSSNVEASGGQVNFWILILWGFWIYIL

SEQ ID NO: 2870 - protein, 493 aa, Physcomitrella patens subsp. patens
  misc_feature (35)..(353): Pfam Name: Glyco_hydro_17 Pfam Description: Glycosyl hydrolases family 17
  misc_feature (376)..(458): Pfam Name: X8 Pfam Description: X8 domain
  misc_feature: Public GI ID no. 168046763
  misc_feature: Bit score of 681.8 for HMM based on sequences of Figure 30
  misc_feature: Functional Homolog Of SEQ ID NO. 2748
MAGHRMQSRQVFTSSVAVVALCLVGWQMEMAVADVGVNWGTISSDPLSNDIVVQMLKDNNFVKVKLFDANSDVIESMRGTNLEVMIAITNEMLASMAASPDAAAAWVKANVTSHLGTGGVNIKYVAVGNEPFLNGYNGRYIDATLPALKNVQAALAAAGLVDTVKAVVPCNADILSDNPYPSQQTFRADLAPVMLGIAAALKSTNSPFVVNLYPFLNLVLQANFPIDFAFFSGFATPIVDGTRVYTNVFDAGFDGVVGALNNAGYPNMAVIVGEIGWPTDGANYANIGLAQKFNQQLVNHLESGVGTPLRPGKLEAYLFGLLDENAKSTLPGNFERHWGIFNFDGTIKYPLDLTGGVTGRQTSLVGSKNVPYYPHQWCVLKTTADLSLLPANLDYACARADCTPLFYGGSCSGLTLHQNASFAFNNYYQFNNQLQAACDFQSLAQVVNTDPSVGTCKFLIGVRPGNSQAIAPPESSSSRSDGLFLLFVIHTYL

SEQ ID NO: 2871 - DNA, 1575 bp, Populus balsamifera subsp. trichocarpa
  misc_feature: Ceres Annot ID no. 1480316
  misc_feature: Encodes the peptide sequence at SEQ ID NO. 2872
atgtcaagattgtcaggaactctgctttgtcttgtgctagcaatcatactactatcagggtcatttccagtgggagaatcagcaataggagtcaactgggggacaatctcatttcacaggttgaagccctcaactgtggtggatctgttgaaagacaacaagataaagagagtgaagttgttcgatgcagacccaggttcgcttactgctttaatggggagtgggattgaagtcatggttgggattcctaatgagatgttggctgctcttagctcttcaactgatgcttctgatttgtgggttaggcaaaatgtgtctagatatgttgttaaaggtggtgctgatataaggagttttactgcatttctcatgcgatgctctcgtataccatacaatgacaggtacgttgctgtaggaaatgaaccattcctcacaagttattcaggtcaatttcaatcttttgttgtccctgctctgctcaatctacaacagtctctggtgaaagcaaatctagctggttatgtaaagctagtagttccttgcaatgctgatgcttatgagtcttctcttccttctcaaggggcattccgacctgaactaactcagattatgactcaacttgtgtccttcctcaactcaaacggctcaccttttgttgtgaatatctacccgtttcttagcctttatgggaactcagattttccacaagactatgcattctttgaggggagtacccatcctgttacagatgggtctaatgtctactacaatgcttttgatgggaatttcgacactttagttgcagcgctcaacaaacttggatatggtcaaatgcccattgttattggcgaggtgggttggccaactgatggagccattggcgccaacctcactgcagcaagggttttcaaccagggacttataaaacatgtattgagtaacaaaggaacccctctgagaccagatgcccctcccatggatatttatcttttcgctctgcttgatgaaggagcaaagagtgtactcccaggaaactttgaaagacactgggggattttctcgtttgatggccaggctaaatatgcactgaaccttggtttgggtaacaagttactgaagaatgcaaagaatgtcgagtatctcccatcaaggtggtgtgtggcagacccctcaaaagatctaacaagtgtagccaaccacctgagaatagcctgcagtgctgctgattgcacaacacttaattatggcggatcttgcaatgaaattggggcaaaaggaaacatctcatatgcattcaacagttactatcagctccagatgcaaaatgcacaaagctgtgatttcgatgggcttggtatggtgacatttctagacccatcagttggtgattgcaggttccctgttggagtgaatgatcataagagttcattagctttcagatcatgtcataggtggaccaccatttggacttctatcctagggggggtgtggcatgtcaagtttagtagaaattcccattgcatcagggcttttgctgcatgtttgtctgcagcagcagcgccaaccttcaaataa

SEQ ID NO: 2872 - protein, 524 aa, Populus balsamifera subsp. trichocarpa
  misc_feature (29)..(365): Pfam Name: Glyco_hydro_17 Pfam Description: Glycosyl hydrolases family 17
  misc_feature (384)..(466): Pfam Name: X8 Pfam Description: X8 domain
  misc_feature: Ceres Annot ID no. 1480316
  misc_feature: Bit score of 714.2 for HMM based on sequences of Figure 30
  misc_feature: Functional Homolog Of SEQ ID NO. 2748
MSRLSGTLLCLVLAIILLSGSFPVGESAIGVNWGTISFHRLKPSTVVDLLKDNKIKRVKLFDADPGSLTALMGSGIEVMVGIPNEMLAALSSSTDASDLWVRQNVSRYVVKGGADIRSFTAFLMRCSRIPYNDRYVAVGNEPFLTSYSGQFQSFVVPALLNLQQSLVKANLAGYVKLVVPCNADAYESSLPSQGAFRPELTQIMTQLVSFLNSNGSPFVVNIYPFLSLYGNSDFPQDYAFFEGSTHPVTDGSNVYYNAFDGNFDTLVAALNKLGYGQMPIVIGEVGWPTDGAIGANLTAARVFNQGLIKHVLSNKGTPLRPDAPPMDIYLFALLDEGAKSVLPGNFERHWGIFSFDGQAKYALNLGLGNKLLKNAKNVEYLPSRWCVADPSKDLTSVANHLRIACSAADCTTLNYGGSCNEIGAKGNISYAFNSYYQLQMQNAQSCDFDGLGMVTFLDPSVGDCRFPVGVNDHKSSLAFRSCHRWTTIWTSILGGVWHVKFSRNSHCIRAFAACLSAAAAPTFK

SEQ ID NO: 2873 - protein, 479 aa, Physcomitrella patens subsp. patens
  misc_feature (35)..(353): Pfam Name: Glyco_hydro_17 Pfam Description: Glycosyl hydrolases family 17
  misc_feature (376)..(458): Pfam Name: X8 Pfam Description: X8 domain
  misc_feature: Public GI ID no. 168003834
  misc_feature: Bit score of 659.0 for HMM based on sequences of Figure 30
  misc_feature: Functional Homolog Of SEQ ID NO. 2748
MVAVAGRQALAFARVAAVVLLCITGWQLGKGNGELGVNWGTISHDPLPNNIVVKLLQDNNFAKVKLFDADPNVIESMRGTNLEVMVAITNDMLAAMAAGTDAAAAWVKQNVTAHLGSGGVNIKYVAVGNEPFLNGYNGKFTDVTYPALKNVQAALAAAGLAETVKAVVPCNADILSNNPLPSQQTFRSDLAPIMLNIAQALDSTKSPFVVNLYPFLSLVLGTNFPIDYAFFSGYSTPLVDGTKTYDNVFDASYDGVVSALVTAGYPNMVVSVGEIGWPTDGNAYANITLAQKFNQQLVNHVESGKGTPLRPGKLEAYVFSLLDENAKSTLPGNFERHWGVFNFDGSVKYLLDLTGGVSGTQTRLIGAQNVPYYPSQWCVLNPIKDLSTLPANLDYACSRADCTPLTTGGSCSGLTLQQNASYAFNQYYQFNNQLKSACDFQGLAQVVTTDPSVGSCKFVIGVAESSTSTPSAPGSAGMI

SEQ ID NO: 2874 - DNA, 1712 bp, Arabidopsis thaliana
  misc_feature: Ceres Annot ID no. 877895
  misc_feature: Encodes the peptide sequence at SEQ ID NO. 2875
atctttgcacccgagagagagctcagtgaaaaagatgggaagcggtgtaggtgtagctctctttgccctctcccttcttctcgtctcccatgaggtggaatctgcaatcggcgtgaactggggaacgttgtcatttcacaagatgagaccttccacagtggtggatctcctcaaagcaaacaagatcaccaaggtgaagcttttcgatgcgaatccagatgcgcttcgagcgttaatgggtactggaatccaagtaatgatcggcattcctaacgagatgctctcaactttcaattctgatttgtttgtccagcaaaatctctctcgcttcataggcaaaaacggtgctgatattaggtatgttgcagtagggaatgagccgtttctgactggttacggtggtcagtttcagaactatgtagtcccaactatggttaacctgcaacaatctttggttagagcaaatctagctagctatgtgaagttggtggttccttgcaacgcagatgcgtatcagtctaatgttccctctcaggggatgttccggcctgagcttacacagattatgactcaattggtttcgtttctcaactccaatggctctccttttgtggttaatatctatcctttccttagtctctatgggaactcggattttccacaagactatgccttttttgaggggagtagtcatccggttccggatgggcctaacacttactataatgcatttgatgggaactttgacactcttgttgctgctctcaccaagcttggatatggtcaaatgcctatagttattggtgagattggttggcctacagatggagcagttggtgctaatctcacagcagcccgggtttttaatcaagggctcattagccatgtgttgagcaacaaaggaacaccgctcaggcctggatctcctcctgcggatgtatatcttttcggtttgcttgacgaaggagcgaaaagcacactgcctggtaactttgagaggcattggggaatcttctctttcgatggacaggccaagtatcgtctcaacttaggactaggcaacagaggactcaagaatgcaaaaaatgtgcagtaccttccttcaaggtggtgtgtggctcacccatcaagagacatgacccaagttggtgaccacctcaggcttgcttgcagtgaagcagattgcacaacgctcaacgacgggggctcgtgcagccagcttggtgaaaaagataatatctcatacgctttcaacagttactatcagatgcagatgcaacatgaaaagagctgtgactttgatggacttggcatggtcaccttcctagatccttcagttggtgactgtcgatttcttgtgggtgttactgatataggcttatcgtcaagtactgagccaatggcaaggtggtctatctaccacatttgcattggactattgatctggactctcacaatgtagattagggaaatttttcagtgttacattatttagcgatatagtagatataggacggagaaattgcataaatatagggtcagatgtattttattgttaagctgaaaagctgaaccagtgttatctctgtaatatcttcttggggtctatattagaaaatcagaaccactaaaactatggtacctttgttgtcaatgtactgtctaagatgagactcaaatcggttatcatcaattagattgtgatcatcact

SEQ ID NO: 2875 - protein, 475 aa, Arabidopsis thaliana
  misc_feature (25)..(339): Pfam Name: Glyco_hydro_17 Pfam Description: Glycosyl hydrolases family 17
  misc_feature (358)..(440): Pfam Name: X8 Pfam Description: X8 domain
  misc_feature: Ceres Annot ID no. 877895
  misc_feature: Bit score of 701.4 for HMM based on sequences of Figure 30
  misc_feature: Functional Homolog Of SEQ ID NO. 2748
MGSGVGVALFALSLLLVSHEVESAIGVNWGTLSFHKMRPSTVVDLLKANKITKVKLFDANPDALRALMGTGIQVMIGIPNEMLSTFNSDLFVQQNLSRFIGKNGADIRYVAVGNEPFLTGYGGQFQNYVVPTMVNLQQSLVRANLASYVKLVVPCNADAYQSNVPSQGMFRPELTQIMTQLVSFLNSNGSPFVVNIYPFLSLYGNSDFPQDYAFFEGSSHPVPDGPNTYYNAFDGNFDTLVAALTKLGYGQMPIVIGEIGWPTDGAVGANLTAARVFNQGLISHVLSNKGTPLRPGSPPADVYLFGLLDEGAKSTLPGNFERHWGIFSFDGQAKYRLNLGLGNRGLKNAKNVQYLPSRWCVAHPSRDMTQVGDHLRLACSEADCTTLNDGGSCSQLGEKDNISYAFNSYYQMQMQHEKSCDFDGLGMVTFLDPSVGDCRFLVGVTDIGLSSSTEPMARWSIYHICIGLLIWTLTM

SEQ ID NO: 2876 - protein, 516 aa, Oryza sativa subsp. japonica
  misc_feature (36)..(373): Pfam Name: Glyco_hydro_17 Pfam Description: Glycosyl hydrolases family 17
  misc_feature (392)..(474): Pfam Name: X8 Pfam Description: X8 domain
  misc_feature: Public GI ID no. 125602994
  misc_feature: Bit score of 675.1 for HMM based on sequences of Figure 30
  misc_feature: Functional Homolog Of SEQ ID NO. 2748
MAAANAGAMVRFVAAFLAAVLVMMVPCAPRAAAAAVGVNWGTVSAHRMPAPVVVELMRANRIGRVKLFDADQAALRALMGSGLQVMVGITNEMLQGIAASPAAADAWVARNVSRYVGPGGADIRHYEASTCQSRTQGMQRWYIAVGNEPFLTSYQGQFQSYVLPAMTNIQQSLVKANLARYIKLVVPCNADAYQSASVPSQGVFRPDLIQIITQLAAFLSSSGAPFVVNIYPFLSLYQSSDFPQDYAFFDGSSHPVVDGPNVYYNAFDGNFDTLVSALSKIGYGQLPIAIGEVGWPTEGAPSANLTAARAFTQGLISHVLSNKGTPLRPGVPPMDVYLFSLLDEEQKSTLPGNFERHWGVFSFDGQAKYPLNLGLGSPVLKNAKDVPYLPPRWCVANPGRDLNNVENHLKLACTMADCTTLYYGGSCNAIGEKGNISYAFNSYYQLRKQDAQSCDFDGLGMITYLDPSIGDCRFLVGIDDSRTSTIYSSGDCSRRRFGLWILAFLVIGFLQIGVYL

SEQ ID NO: 2877 - protein, 475 aa, Brassica oleracea
  misc_feature (23)..(337): Pfam Name: Glyco_hydro_17 Pfam Description: Glycosyl hydrolases family 17
  misc_feature (356)..(438): Pfam Name: X8 Pfam Description: X8 domain
  misc_feature: Public GI ID no. 89257617
  misc_feature: Bit score of 699.3 for HMM based on sequences of Figure 30
  misc_feature: Functional Homolog Of SEQ ID NO. 2748
MGSGVALFTLSLLLVTHHAHSAIGVNWGTMSFHKLKPSTVVDLLKANKITKVKLFDSNPDALRALMGTGIQVMISIPNELLSTFSSDLFVQQNLSRFMGKGGADIRYVAVGNEPFLTSYGGAYQNYVFPAMVNLQQSLVKANLASYVKLVVPCNADAYESNVPSQGTFRPELTQIMTQLVSFLSSIGSPFVVNIYPFLSLYQNSDFPQDFAFFEGSSHPVLDGPNVYYNAFDGNFDTLVSALAKIGYGQMPIVIGEIGWPTDGAVGANLTAARVFNQGLINHLLSNKGTPLRPGSPPEDVYLFGLLDEGAKSTLPGNFERHWGIFSFDGQAKYRLNLGLGNRGLKNAENVQYLPSRWCVAHPAKDMTLVTDHLRLACSQADCTTLNDGGSCSQLGEKDNISYAFNSYYQLQMQNEKSCDFDGLGMVTFLDPSVGECRFLVGVTDKSSSAELMARWGIYHICIGLVVWALTRCYIL

SEQ ID NO: 2878 - protein, 495 aa, Physcomitrella patens subsp. patens
  misc_feature (27)..(346): Pfam Name: Glyco_hydro_17 Pfam Description: Glycosyl hydrolases family 17
  misc_feature (369)..(451): Pfam Name: X8 Pfam Description: X8 domain
  misc_feature: Public GI ID no. 168041780
  misc_feature: Bit score of 593.4 for HMM based on sequences of Figure 30
  misc_feature: Functional Homolog Of SEQ ID NO. 2748
MAREPGVWRVVVVTLLFLVVSQTVNGLGVNWGTISVNPLPPGYVVKMLQANGIKKVKLFDAAYDVIRALAGTDIEVMVAAPNNLLATLAGDPKAAEDWVKANVTSYNFKGGANIRWVAVGNEPFLTAYEGMYLNTTLPALRNIVNALAKAGQANTVRTIIPFNFDILNGAVKPSETRFKVEYLDQIRPMLQIFNSTGAPFSVNLYPFISKYQSPDFPLDYAFFEGSTSAVTDGTFIYKNALDASLDALISALTAEGYPAMEILLGEIGWPTDGNEFANPTLAGKYNQQLINHLQSKVGTPLRPNTFTEFYMFGLLDENIKSILPGPFERHWGMFYYDGVAKYPLDLAAGTGAPPQTIKNAEFPPYMSAQYCVLNENADRTNLSQNVAFACSRTDCTPLYPGSSCGGLSAVQNASYSFNSYFQFQNQDPNACNFQGLGRITTENPSVGNCRFIIGLTKYTPQTRPTSGTAAQSGILVLTIFSLLVSSFRFWLDSAL

SEQ ID NO: 2879 - DNA, 1101 bp, Arabidopsis thaliana
  misc_feature: Ceres Annot ID no. 831967
  misc_feature: Encodes the peptide sequence at SEQ ID NO. 2880
atggggagacattcttgctgttacaaacaaaagctgaggaaagggctttggtctcctgaagaagacgagaagcttcttactcacatcaccaatcacggccatggctgctggagctctgtccctaaactcgctggtttgcagagatgtgggaagagttgtcgactaagatggatcaattacttgagacctgatttaaagagaggagctttttctcctgaagaagagaatctcatcgtcgaacttcatgccgtccttggaaacagatggtcacagattgcgtcaaggcttccgggtagaaccgacaacgagatcaagaatctatggaactcaagcatcaagaagaaactgaaacaaagaggcattgacccaaacacacacaagcccatctctgaagttgagagttttagcgacaaagacaaaccaacaacaagcaacaacaaaagaagcggtaacgatcacaagtctcctagttcctcttctgcgactaaccaagacttcttcctcgaaaggccatctgatttatccgactacttcggatttcagaagcttaacttcaactccaatctaggactctctgttacaactgattcttcactctgctcgatgattccgccgcagtttagccccgggaacatggttggttctgtccttcagacaccagtatgcgtaaagccctcgattagtcttcctcccgacaacaacagttcgagtcctatctccggaggagatcatgtgaaattggctgcaccaaactgggaatttcagacaaacaacaataatacctcaaatttcttcgacaatggcggattctcatggtctatcccaaattcttctacttcttcttcacaagtcaaaccaaatcataacttcgaagaaataaaatggtcagagtatttgaacacaccgttcttcatagggagtactgtacagagtcaaacctctcaaccaatctacatcaaatcagaaacagattacttagccaatgtttcaaacatgacagatccttggagccaaaacgagaacttgggcacaactgaaactagtgacgtgttctccaaggatcttcagagaatggccgtctcttttggtcagtccctttag

SEQ ID NO: 2880 - protein, 366 aa, Arabidopsis thaliana
  misc_feature (14)..(61): Pfam Name: Myb_DNA-binding Pfam Description: Myb-like DNA-binding domain
  misc_feature (67)..(112): Pfam Name: Myb_DNA-binding Pfam Description: Myb-like DNA-binding domain
  misc_feature: Ceres Annot ID no. 831967
  misc_feature: Bit score of 915.6 for HMM based on sequences of Figure 1
  misc_feature: Functional Homolog Of SEQ ID NO. 2880
  misc_feature: in Figure 1
MGRHSCCYKQKLRKGLWSPEEDEKLLTHITNHGHGCWSSVPKLAGLQRCGKSCRLRWINYLRPDLKRGAFSPEEENLIVELHAVLGNRWSQIASRLPGRTDNEIKNLWNSSIKKKLKQRGIDPNTHKPISEVESFSDKDKPTTSNNKRSGNDHKSPSSSSATNQDFFLERPSDLSDYFGFQKLNFNSNLGLSVTTDSSLCSMIPPQFSPGNMVGSVLQTPVCVKPSISLPPDNNSSSPISGGDHVKLAAPNWEFQTNNNNTSNFFDNGGFSWSIPNSSTSSSQVKPNHNFEEIKWSEYLNTPFFIGSTVQSQTSQPIYIKSETDYLANVSNMTDPWSQNENLGTTETSDVFSKDLQRMAVSFGQSL

SEQ ID NO: 2881 - DNA, 1341 bp, Populus balsamifera subsp. trichocarpa
  misc_feature: Ceres Annot ID no. 1469074
  misc_feature: Encodes the peptide sequence at SEQ ID NO. 2882
atggggcggcattcttgctgttacaagcagaagttaagaaaaggcctgtggtctcctgaggaagatgagaaacttcttaattatattactaagcatggacttggttgttggagctctgtccctaaactggcaggtttgcagagatgtggtaagagctgcaggttaaggtggattaactacttgaggcctgatttgaagagaggagcattttctcagcaggaagagaacttgattattgaactccatgcagttcttggcaatagatggtctcagattgcagcacagttacctggaagaactgataatgagataaagaatttatggaattcctgcattaagaagaaactgaggcagagaggcattgaccccaacactcacaaatcactttctgaagctgaggatggtaaagggaagcagcagctcacagctgacaaaagcaatgagaaagtttctattgtatcaaatgaactgaacctcattaagacagctactttaaaaccacctgcagtttcttccagaagctcaaacgtcatcaccaccaacaacaataaggacagaagtggtagtagcaacttgacaaatgttccaccgacacaggaattcttcctcgacaggtttggtacctcccatgaaagctccaccacggccagttgcatgccttctgatttgatggattatttccctttccagaaattggattacaaacctattatagacctctcaatgaatccaaactccactctctgctttaatccaaattcctcctcttctgagatgatttctcatgagttcaattctagtatgacacctccgactattctcccatccgtgtcaacctctatgttccagactccaatatgtgtaaaaccttctgttagtcttccatctgatcataatccttctgtaggctcttgtgatgtcaatggggttcagaactgggaagcaagtagcttcagcaacaacggaagtggaagcaatggaagcagtagcagtattgaattgcaaagcaacaccaatttctttgagagcagcgccttctcgtggggtttagctgattgtgggaaatccagcgacgaagctcaccttcgatctctcgcaaacgagacggttgaagacatcaaatggtctgaataccttagcaccccattctttcttggaagcacaatacaaaaccaaacatctcaacatgtgtacagtgaagtgaaacctgaaacacacttcatagcacaagggtcaagtactagttggctaaagaatcaacatcaacaagcttcacagccagcagacatctataccaaggatctgcaaagacttgctgtggcttttggtcaatccatatag

SEQ ID NO: 2882 - protein, 446 aa, Populus balsamifera subsp. trichocarpa
  misc_feature (14)..(61): Pfam Name: Myb_DNA-binding Pfam Description: Myb-like DNA-binding domain
  misc_feature (67)..(112): Pfam Name: Myb_DNA-binding Pfam Description: Myb-like DNA-binding domain
  misc_feature: Ceres Annot ID no. 1469074
  misc_feature: Bit score of 1162.7 for HMM based on sequences of Figure 1
  misc_feature: Functional Homolog Of SEQ ID NO. 2880
  misc_feature: in Figure 1
MGRHSCCYKQKLRKGLWSPEEDEKLLNYITKHGLGCWSSVPKLAGLQRCGKSCRLRWINYLRPDLKRGAFSQQEENLIIELHAVLGNRWSQIAAQLPGRTDNEIKNLWNSCIKKKLRQRGIDPNTHKSLSEAEDGKGKQQLTADKSNEKVSIVSNELNLIKTATLKPPAVSSRSSNVITTNNNKDRSGSSNLTNVPPTQEFFLDRFGTSHESSTTASCMPSDLMDYFPFQKLDYKPIIDLSMNPNSTLCFNPNSSSSEMISHEFNSSMTPPTILPSVSTSMFQTPICVKPSVSLPSDHNPSVGSCDVNGVQNWEASSFSNNGSGSNGSSSSIELQSNTNFFESSAFSWGLADCGKSSDEAHLRSLANETVEDIKWSEYLSTPFFLGSTIQNQTSQHVYSEVKPETHFIAQGSSTSWLKNQHQQASQPADIYTKDLQRLAVAFGQSI

SEQ ID NO: 2883 - protein, 360 aa, Vitis vinifera
  misc_feature (14)..(61): Pfam Name: Myb_DNA-binding Pfam Description: Myb-like DNA-binding domain
  misc_feature (67)..(112): Pfam Name: Myb_DNA-binding Pfam Description: Myb-like DNA-binding domain
  misc_feature: Public GI ID no. 157346953
  misc_feature: Bit score of 948.8 for HMM based on sequences of Figure 1
  misc_feature: Functional Homolog Of SEQ ID NO. 2880
  misc_feature: in Figure 1
MGRHSCCYKQKLRKGLWSPEEDEKLLMHITKYGHGCWSSVPKLAGLQRCGKSCRLRWINYLRPDLKRGAFSQQEESLIIELHAVLGNRWSQIAAQLPGRTDNEIKNLWNSCIKKKLRQKGIDPNTHKPLVEAENGQDKLPNSDKSNEKANELNLVEAENLKPLSTAAEQPSGLVGHFSFQQLNYGPNIGLSIISEFSSSMTPTILPSMLSTILPTPTSIKPSISLPSSNPSIGSFDVNGVQNWEVGTFSNNASSSNGSRNSIELQNCGKSDKENQIHMLEGDPEDIKWSEYLHTPFLLGTTLQNQSPQPIYSETKPGIHFTTDGSSTGWHQNQQEQPIQASADIYTKDLQRLGVAFGQIC

SEQ ID NO: 2884 - DNA, 1785 bp, Gossypium hirsutum
  misc_feature: Ceres Clone ID no. 1948185
  misc_feature: Encodes the peptide sequence at SEQ ID NO. 2885
ataaaataatggggggaggggtcgagagagaaactataacacttaatgaatgcgacttttctgcttggagagtctcctcttatattaattcaactccttttctcactggctacttcattttctagcctccacctcgctccctctctctctctctctctctctctctctctctctctctctcttgcatttttattttcttaccaaagcattcaaagatactgtagagaagcagccttggtcattgctgacaatctcgcctaggattcagtaaagctgctgttttaagaaaggtctcttcctccttgtaatctggtctggtctgaaaatggggaggcactcttgctgttacaagcagaagctaaggaaaggtctttggtctcccgaagaagatgagaagctcttgaggcatattaccaagtacggccatggttgctggagctctgtccctaaacaagctggtctgcagaggtgtggaaaaagctgcaggttaaggtggattaattatttaaggcctgatttaaagagaggtacattctctcaagaagaagaaaacctcataattgaacttcatgcagttttggggaataggtggtcccaaattgcggcacaattgccaggaagaaccgacaatgaaattaaaaacctatggaactcttgcttaaagaagaagcttaggcagcgaggcattgaccctgtcactcacaaacccctctcagaggttgaacatggtgaagacaagagtcaaccacgcaccaacagcaaggatatggcttcaagtgaattgaacatcaacaccaacaatcctaaacctggaacatcaccagttactccacgaggttaccaactggaaatggaaggttctcccaccaagacagtgaacagcagcgataacaatggcaacaccaccaccaatttgatggcatctactactacagccagcaaaggcttctttctggataaattctcgaccaacagccagccttctgatttggtggggcatcttccagttcaccaattgaactatgcgtccaatgccaggctctcatctacctccaaccctactccctggttcacccaaactacccaagctttcgatatcaattccgaattttcttcagcagcgatgtccagttttctcccaccattaacggcttcgtttctgtctgcttctatggggtacaagccttccgtcgctgatagtccttcaatggcctcgttcaccgtgaatggttcccgctattgggaaacgggtgcctccgctaacaacaacagtaacagcagcagcaacagcactgagctgcaaagcaatagttccttctacgacaataatagctcctcttggggattaccagattgtagcacaccagagaaagaggctccactccatctaatggaaagtcaagcagaagatataaaatggagcgaatatctgaataacccattgctaatggccgctgctttgcaaaatcaaactccacagtccttgtacaacatggacatcaaatcagaaacacatttcctcactaataattcatcaaacagtatgtggactcataatcaacagcaacagcagcaagaacctttacaaaatcccaatatgtgtgctgctaaggacatccacagacttacagcagcttatggacatgtttaggaagcatcaaacttgaactaatggcatgctcatgtataaggtgtgtaccacagatttttcattttcattttctttttaattctggtgtatataggtctgatacaaaaattaattatcacctctgcttttggact

SEQ ID NO: 2885 - protein, 441 aa, Gossypium hirsutum
  misc_feature (14)..(61): Pfam Name: Myb_DNA-binding Pfam Description: Myb-like DNA-binding domain
  misc_feature (67)..(112): Pfam Name: Myb_DNA-binding Pfam Description: Myb-like DNA-binding domain
  misc_feature: Ceres Clone ID no. 1948185
  misc_feature: Bit score of 1156.7 for HMM based on sequences of Figure 1
  misc_feature: Functional Homolog Of SEQ ID NO. 2880
  misc_feature: in Figure 1
MGRHSCCYKQKLRKGLWSPEEDEKLLRHITKYGHGCWSSVPKQAGLQRCGKSCRLRWINYLRPDLKRGTFSQEEENLIIELHAVLGNRWSQIAAQLPGRTDNEIKNLWNSCLKKKLRQRGIDPVTHKPLSEVEHGEDKSQPRTNSKDMASSELNINTNNPKPGTSPVTPRGYQLEMEGSPTKTVNSSDNNGNTTTNLMASTTTASKGFFLDKFSTNSQPSDLVGHLPVHQLNYASNARLSSTSNPTPWFTQTTQAFDINSEFSSAAMSSFLPPLTASFLSASMGYKPSVADSPSMASFTVNGSRYWETGASANNNSNSSSNSTELQSNSSFYDNNSSSWGLPDCSTPEKEAPLHLMESQAEDIKWSEYLNNPLLMAAALQNQTPQSLYNMDIKSETHFLTNNSSNSMWTHNQQQQQQEPLQNPNMCAAKDIHRLTAAYGHV

SEQ ID NO: 2886 - protein, 381 aa, Medicago truncatula
  misc_feature (14)..(61): Pfam Name: Myb_DNA-binding Pfam Description: Myb-like DNA-binding domain
  misc_feature (67)..(112): Pfam Name: Myb_DNA-binding Pfam Description: Myb-like DNA-binding domain
  misc_feature: Public GI ID no. 87241324
  misc_feature: Bit score of 937.1 for HMM based on sequences of Figure 1
  misc_feature: Functional Homolog Of SEQ ID NO. 2880
  misc_feature: in Figure 1
MGRHSCCYKQKLRKGLWSPEEDEKLLNYITKHGHGCWSSVPKLAGLQRCGKSCRLRWINYLRPDLKRGAFSEQEENSIIELHALLGNRWSQIAAQLPGRTDNEIKNLWNSSLKKKLKQKGIDPNTHQPFSENNDNDTPNIQIQKTSVGSNEVKNLFDDTPNPNSIPMDNCNYPLEINSKINNSVNCFIPCDNMVGLGGGSYLNFQQLNYGINNMTLSPPNSNSNTSLCFIPSTSGSTSTCSQMMSELNSSTMFHSMYTNHPSNSISSGEVDGIQNWEFGASKSSNGSSINNYLDHQVVEDIKWSDYINSTPFFLGNNNTFQQTTTSTHSSIYEVKQEMGGFINTNESIQSSSSTWHPHFEADIYSNKDLQRFSLAFGQTLN

SEQ ID NO: 2887 - DNA, 1764 bp, Zea mays
  misc_feature: Ceres Clone ID no. 1398728
  misc_feature: Encodes the peptide sequence at SEQ ID NO. 2888
accgttctcttctccctaatcctggtaatcagtagtagccactagcgctgctgccgttctcttcccctacccgacacaagctccaccacctctatctaccacacgccaccactgtaggagctcctccacgatcatcccgccctagagccataataattcgttgaagaggagggggttcttagaaccagagggcggctacctgtgaaggatacccgtgctgctggctgctgctgttcctcgagctagagccgtgtgtgggctgtgcagattgcagagcgcagcttccagtctcagcattgctttcaatggggaggcactcctgctgttacaagcagaagctgaggaaggggctctggtctcctgaggaagatgagaagctcatgatccacataaccaagcacgggcatggctgctggagcactgtccccaagcttgcagggcttcagaggtgtggcaagagctgcaggctgaggtggataaattacctgaggcctgaccttaaaagaggtgcattctctgaggaggaggaagacctcatcgtcgaacttcatgctgtactggggaacaggtggtctcagattgcaacaaggttgcctggaagaactgacaacgagatcaagaatctctggaactcgagcatcaagaagaagctccggcagaaaggcattgaccccaacacccacaagccgctccttgtcgaggttgaacgcagcaaagcagctccaacgaccagtaccgagagaacctctgagtccaatgatgttgacccttcaagtggcgccgcacttggcaactcgagccatcttcttctcagcgagacagcacaatcaccacagctgccagcgctcggtaagcatcgcagagaaactactagcctggcacatctaagggtgccgcccaaggagttgttccttgaccagctggcttctggtcatgagaacctcactggctgccgcacagcaggcccagttccaaatttccctttccaacagctgatgtgctacaacaatgaatttggcaacaagaatggtgctagtaacaattcactctggtttaaccacaatgagacaagtggcagcaccatttccactgtgatgccaccagtttcgccatcaactctctcgacatcaacagggctcaataggtcaccagacaacccacactcgggaggcactgccattcagagcacccagttctactgggacgctgctaatcctagcagctgcagcagtagaggaagcagcggaagcaacggcttgggatttgagctgcaaagcacaagctcgcttctggagagtagtgttttcccatggacagaattaacaccagataagaatagccaagttcagcttggggaagaactcaagtggcccgacttgctccacggaacattcacagacacacatgcaaccatgcagaaccttagccagtcactgtacgaagatgttatcaaagccgagagccaattcaacatagagggcctctgtgcagcctggtctcaaaatctgcagccacagcaacacctgcaggtatcagatttgtatgacaaggatttgcaaaggatgtccttgtcttttgagaatatctagacagcatgtttcagcatgcagggaacagagaaatagcagaaagctgagtcaatgaagccttaaaaaatacaatatttcttcacagattcatttgaaggctatgtggaggtgtgttttacgtaggtacattcttatgatgaaacagagatcaatactgataactgttcaccagtgt

SEQ ID NO: 2888 - protein, 427 aa, Zea mays
  misc_feature (14)..(61): Pfam Name: Myb_DNA-binding Pfam Description: Myb-like DNA-binding domain
  misc_feature (67)..(112): Pfam Name: Myb_DNA-binding Pfam Description: Myb-like DNA-binding domain
  misc_feature: Ceres Clone ID no. 1398728
  misc_feature: Bit score of 1057.3 for HMM based on sequences of Figure 1
  misc_feature: Functional Homolog Of SEQ ID NO. 2880
  misc_feature: in Figure 1
MGRHSCCYKQKLRKGLWSPEEDEKLMIHITKHGHGCWSTVPKLAGLQRCGKSCRLRWINYLRPDLKRGAFSEEEEDLIVELHAVLGNRWSQIATRLPGRTDNEIKNLWNSSIKKKLRQKGIDPNTHKPLLVEVERSKAAPTTSTERTSESNDVDPSSGAALGNSSHLLLSETAQSPQLPALGKHRRETTSLAHLRVPPKELFLDQLASGHENLTGCRTAGPVPNFPFQQLMCYNNEFGNKNGASNNSLWFNHNETSGSTISTVMPPVSPSTLSTSTGLNRSPDNPHSGGTAIQSTQFYWDAANPSSCSSRGSSGSNGLGFELQSTSSLLESSVFPWTELTPDKNSQVQLGEELKWPDLLHGTFTDTHATMQNLSQSLYEDVIKAESQFNIEGLCAAWSQNLQPQQHLQVSDLYDKDLQRMSLSFENI

SEQ ID NO: 2889 - DNA, 1551 bp, Glycine max
  misc_feature: Ceres Clone ID no. 513273
  misc_feature: Encodes the peptide sequence at SEQ ID NO. 2890
acttcattttcctgtgttcaattcacataatctctctcgctctcatattctccctatcacagtctggttcagtgccactcctgctgacatttcacctacaagttccattcaataagccatcagttaattggaaaggtagttcaccccctcattgttttgtgggggaaaacccacaatacaaaatgggaaggcactcttgctgttacaaacagaaacttaggaagggtctttggtcaccagaagaagatgaaaaacttctgaggcatattacgaagtacggtcatggatgttggagctcagttcctaagcaagcaggtttgcagaggtgcggcaagagctgcaggcttaggtggatcaattacttaaggcctgatttgaagagaggtacattctcacaagaggaggaaactctcatcattgaacttcatgcagtgctagggaacagatggtctcaaattgcagctcaattgccagggaggaccgacaatgaaataaagaatctgtggaattcttgcctaaagaagaaactgaggcaaagaggaatagaccctgtgacacataagccactgtcagagtttgagaatggggaagaggacaaaacaagaagccaagagttatccaatgaattgaacctcctgaattcagagagcttcaagtcagatgaagggtcctatgagcagagagcatcatcatcaattgcccccaaagcctatgagatggaaggctcttgcagctccaagattaacaccaccaaaaatgacaccaacttgatgtccaattgttccaacaaagacatgttcttagacagctacaccactagttgccaaccctcagatttgatgggaaattaccctcttcaaatcactgacactctcccaaccaattcaaactcttgccattggttcagccaaactgcaagaccctttgatatgaactctgagtctacaatcacttccaatgttatgtccattcttccacctacaacaacctcatttctcccaagcacttctttttgctacaagccatcacttggtgtcccttcagaagatatttcaacagcatcttttgctttgaatggtcccaattactgggaagccagtgcctccaacaacagcaatggaagcaacaacacaagtgatggcagcagagagttgacaactacaagtagcaagaacagtgtactctcttcttggggattgacagaagaaacaaagtggtctgagtacctccaaaacccaatgctaatgctggcagctcctgaatcattgtgcaaccaaattaggccagccacacatttggtacctgataacactttagggtcaataatagtgcctgattccaaggaccaacaacaacaacaacaatctcaaaattctagcatcttctccaaggacgcgcagaagctaacagcagcctttggacatatatagcaccaggctttgacacaatgaaatactattttagaagggctccaagggatttatttgtgttcttagtacaggtgtgtgaaacaacagattaattttgctcttgtatatagataaggtctgt

SEQ ID NO: 2890 - protein, 415 aa, Glycine max
  misc_feature (14)..(61): Pfam Name: Myb_DNA-binding Pfam Description: Myb-like DNA-binding domain
  misc_feature (67)..(112): Pfam Name: Myb_DNA-binding Pfam Description: Myb-like DNA-binding domain
  misc_feature: Ceres Clone ID no. 513273
  misc_feature: Bit score of 1041.3 for HMM based on sequences of Figure 1
  misc_feature: Functional Homolog Of SEQ ID NO. 2880
  misc_feature: in Figure 1
MGRHSCCYKQKLRKGLWSPEEDEKLLRHITKYGHGCWSSVPKQAGLQRCGKSCRLRWINYLRPDLKRGTFSQEEETLIIELHAVLGNRWSQIAAQLPGRTDNEIKNLWNSCLKKKLRQRGIDPVTHKPLSEFENGEEDKTRSQELSNELNLLNSESFKSDEGSYEQRASSSIAPKAYEMEGSCSSKINTTKNDTNLMSNCSNKDMFLDSYTTSCQPSDLMGNYPLQITDTLPTNSNSCHWFSQTARPFDMNSESTITSNVMSILPPTTTSFLPSTSFCYKPSLGVPSEDISTASFALNGPNYWEASASNNSNGSNNTSDGSRELTTTSSKNSVLSSWGLTEETKWSEYLQNPMLMLAAPESLCNQIRPATHLVPDNTLGSIIVPDSKDQQQQQQSQNSSIFSKDAQKLTAAFGHI

SEQ ID NO: 2891 - protein, 314 aa, Arabidopsis thaliana
  misc_feature (14)..(61): Pfam Name: Myb_DNA-binding Pfam Description: Myb-like DNA-binding domain
  misc_feature (67)..(112): Pfam Name: Myb_DNA-binding Pfam Description: Myb-like DNA-binding domain
  misc_feature: Public GI ID no. 15223612
  misc_feature: Bit score of 463.2 for HMM based on sequences of Figure 1
  misc_feature: Functional Homolog Of SEQ ID NO. 2880
MKRHSCCYKQKLRKGLWSPEEDEKLLNYITKHGHGCWSSVPKLAGLERCGKSCRLRWINYLRPDLKRGAFSSEEQNLIVELHAVLGNRWSQIAARLPGRTDNEIKNLWNSCIKKKLMKKGIDPITHKPLSEVGKETNRSDNNNSTSFSSETNQDLFVKKTSDFAEYSAFQKEESNSVSLRNSLSSMIPTQFNIDDGSVSNAGFDTQVCVKPSIILLPPPNNTSSTVSGQDHVNVSEPNWESNSGTTSHLNNPGMEEMKWSEEYLNESLFSTQVYVKSETDFNSNIAFPWSQSQACDVFPKDLQRMAFSFGGQTL

SEQ ID NO: 2892 - protein, 439 aa, Vitis vinifera
  misc_feature (14)..(61): Pfam Name: Myb_DNA-binding Pfam Description: Myb-like DNA-binding domain
  misc_feature (67)..(112): Pfam Name: Myb_DNA-binding Pfam Description: Myb-like DNA-binding domain
  misc_feature: Public GI ID no. 147833906
  misc_feature: Bit score of 1093.5 for HMM based on sequences of Figure 1
  misc_feature: Functional Homolog Of SEQ ID NO. 2880
  misc_feature (191)..(191): Xaa is any aa, unknown, or other
MGRHSCCYKQKLRKGLWSPEEDEKLLMHITKYGHGCWSSVPKLAGLQRCGKSCRLRWINYLRPDLKRGAFSQQEESLIIELHAVLGNRWSQIAAQLPGRTDNEIKNLWNSCIKKKLRQKGIDPNTHKPLVEAENGQDKLPNSDKSNEKANELNLVEAENLKPLSTAAEQYPVEVSPSSKINSSSNGNNLTXPQPTQEFFLDRFVTSHESSTTSCRPSGLVGHFSFQQLNYGPNIGLSVNPNATLSFNPNSRSPEIISEFSSSMTPTILPSMLSTILPTPTSIKPSISLPSSNPSIGSFDVNGVQNWEVGTFSNNASSSNGSRNSIELQSNSAFFENNFFSLGLADCGKSDKENQIHMLEGDPEDIKWSEYLHTPFLLGTTLQNQSPQPIYSETKPGIHFTTDGSSTGWHQNQQEQPIQASADIYTKDLQRLGVAFGQIC

SEQ ID NO: 2893 - protein, 380 aa, Vitis vinifera
  misc_feature (14)..(61): Pfam Name: Myb_DNA-binding Pfam Description: Myb-like DNA-binding domain
  misc_feature (67)..(112): Pfam Name: Myb_DNA-binding Pfam Description: Myb-like DNA-binding domain
  misc_feature: Public GI ID no. 147767556
  misc_feature: Bit score of 848.1 for HMM based on sequences of Figure 1
  misc_feature: Functional Homolog Of SEQ ID NO. 2880
MGRHSCCYKQKLRKGLWSPEEDEKLLRHITKYGHGCWSSVPKQAGLQRCGKSCRLRWINYLRPDLKRGTFSLQEENLIIELHSVLGNRWSQIAAQLPGRTDNEIKNLWNSCLKKKLRQRGIDPNTHKPLSEVENREDSNPPTDSQDKASGVSSELKPPQGCQPSDVVGYLAPQQLNYPSNARLSINPTQPLWFSQSSKTLDMNSEFSSNAVSSVLSSVTSSLLPSPMPYKPSIPFHSDNPSIPSFTLSGSRFWDAGASTNSSNSSSGSSSSAELQSNSSFFENSIFPWGLADCSTSDKGAQIHIIESEQEDIKWPEYLQNPFLMAAALQNQTPQPLYNEIKSETHFITETSSAMWAHSQQQQEHLQAPDIQRLPATFGHI

SEQ ID NO: 2894 - protein, 451 aa, Vitis vinifera
  misc_feature (14)..(61): Pfam Name: Myb_DNA-binding Pfam Description: Myb-like DNA-binding domain
  misc_feature (67)..(112): Pfam Name: Myb_DNA-binding Pfam Description: Myb-like DNA-binding domain
  misc_feature: Public GI ID no. 225437752
  misc_feature: Bit score of 972.7 for HMM based on sequences of Figure 1
  misc_feature: Functional Homolog Of SEQ ID NO. 2880
MGRHSCCYKQKLRKGLWSPEEDEKLLRHITKYGHGCWSSVPKQAGLQRCGKSCRLRWINYLRPDLKRGTFSLQEENLIIELHSVLGNRWSQIAAQLPGRTDNEIKNLWNSCLKKKLRQRGIDPNTHKPLSEVENREDSNPPTDSQDKASGVSSELNLLKVDNSKPEAALLEQRSSSIATRGYGMEVEGSSSSKTINSNNNNNSNSNLMSPTPNKDFFLDRFMISHQENSTGCQPSDVVGYLAPQQLNYPSNARLSINPTQPLWFSQSSKTLDMNSEFSSNAVSSVLSSVTSSLLPSPMPYKPSIPFHSDNPSIPSFTLSGSRFWDAGASTNSSNSSSGSSSSAELQSNSSFFENSIFPWGLADCSTSDKGAQIHIIESEPEDIKWPEYLQNPFLMAAALQNQTPQPLYNEIKSETHFITETSSAMWAHSQQQQEHLQAPDIQRLPATFGHI

SEQ ID NO: 2895 - DNA, 1395 bp, Populus balsamifera subsp. trichocarpa
  misc_feature: Ceres Annot ID no. 1471467
  misc_feature: Encodes the peptide sequence at SEQ ID NO. 2896
atggggaggcactcttgttgctacaagcagaagctaaggaaaggcctgtggtcgcctgaggaagatgagaaactcttaaggcatatcaccaagtatggccatggttgttggagctctgtcccaaagcaagctggtttgcaaaggtgtggcaagagctgcagactaaggtggattaattacttgaggcctgatttgaagagaggcacattctcacagcaggaagagaacctcataattgagcttcatgcagttctaggaaataggtggtctcagattgcggcacaattgcctggaaggacagacaatgaaataaagaatctatggaactcctgcttaaagaaaaaacttcggcagagaggcattgaccctgttacccacaaaccactttctgaggttgaaaatggagaagacaagaatccacctgctagtggcacccaagataaagcctctgcagtctccaatactgaactcaacctcctcaaagctgataattctaagtcatcaggagcaaatttacaagaaaaaagatcatctccaatttctccaaatggctaccaattggagagggaaagtacttccggctccaaggtcatgaatggcaacggcaataacaccaatgaccatgttaacaacaatttgatgacaccaacaagcaacaaagactttttcttggataggtttacagcctcccaccatcaaggttccacaagtaactgccagccttcggatttcgtggggcatttccctcttcagcaattgaattatgcatccaatgccaggctcgcaacgaactcgattccctccctctggttgagccaaaccagcaaagcctttgacatgaactctgaattctcttcgactgcgataccctccattcttccaccagcagtaacaagctcatttcattctacttctatgagctacaagccttccattactgtttcacctgacaatccttcattgccctcttttactaccaacagctgtcggctgtgggaaaccggtacccccagaagcaacagtaacagcaatactgtaagcaatggcagtaccgagctgcaaagcaacagctccttctttgagaacgccatcttttcttggggactaggagagtgtggctcagcagaaaaagaggcacagaaccacttgatgggaagccagcacgaggacatcaagtggcctgaatatcttcaaaatccattgctcatggctgctgctttacaaaatcaaaatcagcaatcattgtacaatgagataaaatcagaaacgcaagtcgtaactgaaaattcaagtggtatgtggcctcataaccaccagcagcagcaacctttacaaaatcctgatatatgtcccagggatattcagagaattacagcatcatatggatatatttag

SEQ ID NO: 2896 - protein, 464 aa, Populus balsamifera subsp. trichocarpa
  misc_feature (14)..(61): Pfam Name: Myb_DNA-binding Pfam Description: Myb-like DNA-binding domain
  misc_feature (67)..(112): Pfam Name: Myb_DNA-binding Pfam Description: Myb-like DNA-binding domain
  misc_feature: Ceres Annot ID no. 1471467
  misc_feature: Bit score of 951.2 for HMM based on sequences of Figure 1
  misc_feature: Functional Homolog Of SEQ ID NO. 2880
MGRHSCCYKQKLRKGLWSPEEDEKLLRHITKYGHGCWSSVPKQAGLQRCGKSCRLRWINYLRPDLKRGTFSQQEENLIIELHAVLGNRWSQIAAQLPGRTDNEIKNLWNSCLKKKLRQRGIDPVTHKPLSEVENGEDKNPPASGTQDKASAVSNTELNLLKADNSKSSGANLQEKRSSPISPNGYQLERESTSGSKVMNGNGNNTNDHVNNNLMTPTSNKDFFLDRFTASHHQGSTSNCQPSDFVGHFPLQQLNYASNARLATNSIPSLWLSQTSKAFDMNSEFSSTAIPSILPPAVTSSFHSTSMSYKPSITVSPDNPSLPSFTTNSCRLWETGTPRSNSNSNTVSNGSTELQSNSSFFENAIFSWGLGECGSAEKEAQNHLMGSQHEDIKWPEYLQNPLLMAAALQNQNQQSLYNEIKSETQVVTENSSGMWPHNHQQQQPLQNPDICPRDIQRITASYGYI

SEQ ID NO: 2897 - DNA, 1395 bp, Populus balsamifera subsp. trichocarpa
  misc_feature: Ceres Annot ID no. 1444604
  misc_feature: Encodes the peptide sequence at SEQ ID NO. 2898
atggggaggcactcttgttgctacaagcagaagctacggaaaggcctgtggtcacctgaggaagatgagaaacttttaagtcatattactaagtatggtcatggttgttggagttctgtcccaaagcaagctggtttgcaaaggtgtggcaagagctgcagactaagatggattaattacttaaggcctgatttgaagagaggcacattctcacatctggaagagaacctcataattgaacttcatgcggttctaggaaacaggtggtctcagattgcggcgcagttgcctggaaggactgacaatgaaataaagaatctgtggaactcttgcttaaagaaaaaacttaagcagagaggcattgaccctgtcacccataaaccactttctgaggttgaagatggagaagacaagaatccagctgccagtagaaaccaagataaagcctctgcagtatccaatactgaactcaacctcctcaaagctgatcattctaagccattaggagcaaatttacaagaaaaaagatcatcttcaatttctcctcatggcaatcaattggagagggaaagtacttccagcttcaaggccatgaatgaaaacaacaacaataccaatgaccatggtaacaataatttgatgacaccaacaagcaacaaggactttttcttcgataggtttacagctttcctccatgaaggctccacgagtaattgcccgccctcgggttttgtgggacatttccctcttcagcaattgaattatgcatccaatgccaggctcgcgacgaactcaattccttctctttggttgagccaaaccagtaaagcttttggcatgaattgtgaattctcttcgactatgataccctccattcctccaccagctgtaacaagctcatttctttcttcttctatgggctacaagccttccattactgttccaccagacaatccttcattgccctcttttacaaccaacagttatcggccgtgggaaaccggtgctcccagcaacaatagtaacagcagtactggaagcaatggcagtactgagctgcaaagcaacagctccttctttgagaacaccatcttttcttggggattaggagactgtagctcaacagaaaaggaggcacagaaccacttgattggaagccaacaggaggacatcaggtggcctgaatatcttcaaaatccattgctcatggctgcttctttgcaaaatcaaaatcagcaatccttgtacaatgagataaaaacagaaacacatctcctaacagaaaatccaagtggtatgtggcctgataaccagcaggaacaggaacctttacagaatcctgatatatgtccgaaagatatgcagagaatcacagcatcttatggatatgtttag

SEQ ID NO: 2898 - protein, 464 aa, Populus balsamifera subsp. trichocarpa
  misc_feature (14)..(61): Pfam Name: Myb_DNA-binding Pfam Description: Myb-like DNA-binding domain
  misc_feature (67)..(112): Pfam Name: Myb_DNA-binding Pfam Description: Myb-like DNA-binding domain
  misc_feature: Ceres Annot ID no. 1444604
  misc_feature: Bit score of 906.8 for HMM based on sequences of Figure 1
  misc_feature: Functional Homolog Of SEQ ID NO. 2880
MGRHSCCYKQKLRKGLWSPEEDEKLLSHITKYGHGCWSSVPKQAGLQRCGKSCRLRWINYLRPDLKRGTFSHLEENLIIELHAVLGNRWSQIAAQLPGRTDNEIKNLWNSCLKKKLKQRGIDPVTHKPLSEVEDGEDKNPAASRNQDKASAVSNTELNLLKADHSKPLGANLQEKRSSSISPHGNQLERESTSSFKAMNENNNNTNDHGNNNLMTPTSNKDFFFDRFTAFLHEGSTSNCPPSGFVGHFPLQQLNYASNARLATNSIPSLWLSQTSKAFGMNCEFSSTMIPSIPPPAVTSSFLSSSMGYKPSITVPPDNPSLPSFTTNSYRPWETGAPSNNSNSSTGSNGSTELQSNSSFFENTIFSWGLGDCSSTEKEAQNHLIGSQQEDIRWPEYLQNPLLMAASLQNQNQQSLYNEIKTETHLLTENPSGMWPDNQQEQEPLQNPDICPKDMQRITASYGYV

SEQ ID NO: 2899 - DNA, 1532 bp, Gossypium hirsutum
  misc_feature: Ceres Clone ID no. 1855571
  misc_feature: Encodes the peptide sequence at SEQ ID NO. 2900
ctacttcattttcgatcccttcttttatatcaaaatcctctctttgtctgttacattttcttttttattaccaaagcattccaaaaacaaatgttcatagctaccattttcacctaggattcaccaaagttttctgttttgggaaaggtcttttgctctccctcctttacaattagtgtatggtctcaaaatggggaggcactcctgctgttacaagcagaagctaaggaaaggtctttggtcccctgaagaagatgagaagctgttgaggcatattacaaagtacggccatggttgctggagctctgtccctaaacaagctggcctgcagaggtgtggaaagagctgcagattaaggtggattaattacttaaggcctgatttaaagagaggcacattctcacaagaagaagagaatctcataatcgaacttcatgcagttttggggaaccggtggtcccagatagctgcgcaattgccaggaagaaccgacaatgaaattaaaaacctatggaactcttgcttgaagaagaagcttaggcagagaggcattgaccctgtcactcacaagccactctctgaggttgaaaatggagaagacaacaacaagagtcaacacacaaacagcctggacatggtttccgggccatctagtgaattgaagctcaacaccgacaaccttaaacctggaacagctttatatgaacaaagaccaacatcatcaattactgcaccagcaccaggttatcagttggaaatggaaggctgttccagctccaacaatctgatgacatctacaacccgcaaagacttgttcctcgatagattcgcaagcacagccaccactaccaacggccagccttgtgatttcatgcctcattttccggttcagcaattgagctacgcatcaaccaacccaaggctctcaccctggttctcccagtctgagttttcttcaagttccatgtctacacttctcccaccattggcaacctcaccattcctttcctctcctataggattcaacccttctgtcacacttccctctcacactccttcaatgccttcctttactgttaacaacagttacgcttggggaatggcagattgcagcacatcagagaaagaagaagctccaatccatctaatggaaacccaacccgacgaaatgaaatggccggaatatctcaataacccattattaatggcggctgctttgcaaaatcaagcaccacaatccagcttatacaatatcgagataaaatcggaaacacattgcttaacgaatactaagagtttatcaaacagtatgtggcctcaaaatcaacagccgcagcagcaacaagaaggtttacaaaattccgatatgtgtgctaaggatatccagagacttacgacagcttatggacatatttagctctgcctttttttatatcaggtgtgtaccatagtttttctttttccttcatatctagtgtatataagtatgatacacaaaattcatcacctctggttttggactatttgtgagc

SEQ ID NO: 2900 - protein, 408 aa, Gossypium hirsutum
  misc_feature (14)..(61): Pfam Name: Myb_DNA-binding Pfam Description: Myb-like DNA-binding domain
  misc_feature (67)..(112): Pfam Name: Myb_DNA-binding Pfam Description: Myb-like DNA-binding domain
  misc_feature: Ceres Clone ID no. 1855571
  misc_feature: Bit score of 816.5 for HMM based on sequences of Figure 1
  misc_feature: Functional Homolog Of SEQ ID NO. 2880
MGRHSCCYKQKLRKGLWSPEEDEKLLRHITKYGHGCWSSVPKQAGLQRCGKSCRLRWINYLRPDLKRGTFSQEEENLIIELHAVLGNRWSQIAAQLPGRTDNEIKNLWNSCLKKKLRQRGIDPVTHKPLSEVENGEDNNKSQHTNSLDMVSGPSSELKLNTDNLKPGTALYEQRPTSSITAPAPGYQLEMEGCSSSNNLMTSTTRKDLFLDRFASTATTTNGQPCDFMPHFPVQQLSYASTNPRLSPWFSQSEFSSSSMSTLLPPLATSPFLSSPIGFNPSVTLPSHTPSMPSFTVNNSYAWGMADCSTSEKEEAPIHLMETQPDEMKWPEYLNNPLLMAAALQNQAPQSSLYNIEIKSETHCLTNTKSLSNSMWPQNQQPQQQQEGLQNSDMCAKDIQRLTTAYGHI

SEQ ID NO: 2901 - DNA, 1246 bp, Gossypium hirsutum
  misc_feature: Ceres Clone ID no. 1929622
  misc_feature: Encodes the peptide sequence at SEQ ID NO. 2902
gcgccttttctttctcttatatattaattcgactcccttttctaagcaacatcttcatttttcttgcttctccttaacatggttgtttgatatctgacaaattttccacctaggaatcagtgaagtgtgtgttctgttctgtctgtatctttttcttacactcattgtaacttcggtctggtctcaaaaatgggaaggcaatcttgttgttacaagcaaaagctaaggaaaggtctttggtcccctgaagaagacgaaaagcttttaaggcatattacaaagtatggccatggttgttggagctccatccctaaacaagctgggttacagaggtgtgggaagagttgcaggttgaggtggattaattatttaaggcctgatttaaagagaggcacattttcacaagaagaagaaaatctcataattgaacttcatgcagttttggggaatcggtggtctcaaattgctgcacgattaccaggaagaaccgacaatgaaatcaagaacctatggaactcttgtttgaaaaagaagcttaaacagaaaggcatcgaccctgtcactcacaagccactatccgaggtcgaaaatggcgaaggaaatggaagcaacaagccatctttggtgggtcatcatccaattcaccaatatacatcgccgcccccaccaccaccaaagctctcctctaactggttcaaccctgaattttcaccacccatgaccgcctcttacggacccttatactatggaaccaccaccggtggctcagccaataacaccacttggggattggttcaaacacaaactgaagaagaagaagaagaagaagaagaagaaaccaaatggactgagttgcttaatagccctttattaatggcggctgctttacaaaatcataccccacaatcttattacaatatcgagatcaaatcagagccttgttacttaactaatagttcatcatcatcatcatcatcaaacgatatgtggtggcctcagacccaacaacagcagttaccactacgacatgaacctttacaaaatccagacatatgtggtaaggatatgcagacactcacagcagcagcttttggacatatttaggggtgtgtctgtaccccaattttttttttttaaattttttgccttcggtttcatgtatattggtctgatacaaaaaaaagtttatcaatgactgttctttttgtactatttgtgagcaaaacaatctttgtagtttgttatt

SEQ ID NO: 2902 - protein, 304 aa, Gossypium hirsutum
  misc_feature (14)..(61): Pfam Name: Myb_DNA-binding Pfam Description: Myb-like DNA-binding domain
  misc_feature (67)..(112): Pfam Name: Myb_DNA-binding Pfam Description: Myb-like DNA-binding domain
  misc_feature: Ceres Clone ID no. 1929622
  misc_feature: Bit score of 486.1 for HMM based on sequences of Figure 1
  misc_feature: Functional Homolog Of SEQ ID NO. 2880
MGRQSCCYKQKLRKGLWSPEEDEKLLRHITKYGHGCWSSIPKQAGLQRCGKSCRLRWINYLRPDLKRGTFSQEEENLIIELHAVLGNRWSQIAARLPGRTDNEIKNLWNSCLKKKLKQKGIDPVTHKPLSEVENGEGNGSNKPSLVGHHPIHQYTSPPPPPPKLSSNWFNPEFSPPMTASYGPLYYGTTTGGSANNTTWGLVQTQTEEEEEEEEEETKWTELLNSPLLMAAALQNHTPQSYYNIEIKSEPCYLTNSSSSSSSSNDMWWPQTQQQQLPLRHEPLQNPDICGKDMQTLTAAAFGHI

SEQ ID NO: 2903 - protein, 430 aa, Zea mays
  misc_feature (14)..(61): Pfam Name: Myb_DNA-binding Pfam Description: Myb-like DNA-binding domain
  misc_feature (67)..(112): Pfam Name: Myb_DNA-binding Pfam Description: Myb-like DNA-binding domain
  misc_feature: Public GI ID no. 212722316
  misc_feature: Bit score of 808.4 for HMM based on sequences of Figure 1
  misc_feature: Functional Homolog Of SEQ ID NO. 2880
MGRHSCCYKQKLRKGLWSPEEDEKLMNHITKHGHGCWSSIPKLAGLQRCGKSCRLRWINYLRPDLKRGAFSQDEEDLIIELHAVLGNRWSQIAAQLPGRTDNEIKNLWNSCIKKKLRQKGIDPNTHKPLTEADRSGAAPTISTERTSGSSEINPSSAGALGNLSHLLSETAQSSMLMPVYDKNRAETPNLARPKVPPKELFLEQLTAGHESPSTCRSSGQTLYFPFQQPLGYNSESGSGDGANMNSLWFNQSDFNCSTISTVMPPASPSALSTSMGLNLPPDNSRHGGTGIGSTAVDSFYWDGTNPSSSSSTGSRGSNSMGFEPQSTSSILENSVFQWTDIGQEKDTRAHLVEELKWPDLLHGTFAETTTAMQNQSQTLYDDVIKAESQFSMEGICASWFQNQQPQQQLQATPDMYDKDLQRMQLSFENI

SEQ ID NO: 2904 - protein, 427 aa, Oryza sativa subsp. japonica
  misc_feature (14)..(61): Pfam Name: Myb_DNA-binding Pfam Description: Myb-like DNA-binding domain
  misc_feature (67)..(112): Pfam Name: Myb_DNA-binding Pfam Description: Myb-like DNA-binding domain
  misc_feature: Public GI ID no. 115461995
  misc_feature: Bit score of 837.5 for HMM based on sequences of Figure 1
  misc_feature: Functional Homolog Of SEQ ID NO. 2880
MGRHSCCYKQKLRKGLWSPEEDEKLMNHITKHGHGCWSSVPKLAGLQRCGKSCRLRWINYLRPDLKRGAFSQEEEDLIIELHAVLGNRWSQIAAQLPGRTDNEIKNLWNSCIKKKLRQKGIDPNTHKPLTEADRRGAAPTVSTERTSGSSDVNPSSAGALGNLSHLLSETAQSSMLLPVYDKNHPETASLPRPKVPPKELFLDQLTAGHESPSSCRSSGPTLYFPFQQPLGYSNECGTGDGASMNSLWFNQNDFNCSTISTVMPPVSPSALSTSMGLNLPPENPRHGGTGIGNTPFYWDGSNPSSSGSTGSSGSNSMGFEPQSTTSILENSVFPWTDIGQEKDTRVHLVEELKWPDLLHGTFAEATTAMQNQSQSLYDDVIKAESQFNMEGICASWFQNQQPQQQLQAASDMYDKDLQRLPLSFEHI

SEQ ID NO: 2905 - DNA, 2124 bp, Panicum virgatum
  misc_feature: Ceres Clone ID no. 1769439
  misc_feature: Encodes the peptide sequence at SEQ ID NO. 2906
aaagaaaaggagaggagtgccccctaacctttccttgctttccactgaaatctcctatctgcaaccatacagttgctcaattctggtctcagctgcagcccaatcattcattggtatataagtcactacaccctctgcattttccacccctttagccatcatcaatccttgaagaagcttcgtgctaccggaggtggtgttcgctgtgcacaattggaggctgtatacatccacagacctgtcagctccgtgagcttggagctcccaggttctgcattgcgctgagatggggaggcattcttgctgctacaagcaaaagttgagaaaggggctctggtctcctgaggaggatgagaagctcatgaatcacataacaaagcatggccatggctgctggagttctgttcccaaactcgcagggctccaaaggtgcggaaagagttgcaggctgagatggataaactatctgaggccagacctcaagagaggggcattctctcaagaggaagaagacctcatcgttgagctgcatgctgtccttgggaacaggtggtctcaaattgcagcacagctgcctggaaggactgacaacgagatcaagaatctatggaactcatgcatcaagaagaagctgaggcagaaaggcattgatcccaacacccacaagccgcttgctaaggctgatcgcaatggtgcagctcccaccatcagcaccgagaggacctcagggtccagcgacgtcaacccgtcgagcactggggctctggggaacttgagccacctcctcagtgagacggctcaatcatcaatgctgctgccagtatatgacaagaatcaatctgaagctccacatttggcacgccctaaggtgccaccaaaggagttgtttctggaccagcttactactggacacaagagcccatcaacctgccgctcatcaggccaaacgctgtacttcccattccaacagccattgggctacagcagcgagagtggcagtggtgatggtgcaagtatgaactcactctggttcaaccagaatgacttcaactgcagcacaatttccactgtgatgccgccagtttcaccatcagccctctcaacatcgatggggctgaatctcccaccagataatcctcgacatggaggcactggcattggaagtgcctcggtagattcattttactgggatggtacaaatcctagcagcagtagcagtactgggagcagaggaagcaacagtttgggatttgaaccacagagcacaagctcaattctggagaacagtgtgttcccatggacagatatcgcacaagaaaaagatacaagagctcacttaggagaggaacttaagtggcctgacttgctccatggaacctttgctgagacgaccatagccatgcaaaaccagagccaatcactctatgatgatgtgatcaaggcagagagccaattcagcatggacggaatgtgtgcttcttggtaccagaatcagcaaccacagcaacagctgcaggcagcaccagacatgtatgacaaagacttgcaaagaatgcaagtttcttttgagaatatctaggcattatgttccaccatatggaacagagcagaccagcagaagaagaaacttataattttcacagattcatgagcagaaatatgctgagccgcttacatagatatgtatcaatgtatgtaagttgatacagaaaccatccaccatagctgttcctcagtcgaagatcctgcagtatcatggaaagggcagtcctggccttaggagtggcagcggaatgcatagaaaagtatgttctagagtctccttttctttctcttcgcaattgtttttttttccttctgtacaagacaactcaacttttggacatttgagttttgttcactctctgtttattaaataaatataggaaagcatgggcaaaactgcatgtgtcggtagctctcataaaccatgcaagtagtcccaaacttttcaaccattgccatgcacgtccatgcagattaattattgcatgttgtattttcatttctacttttgagaagttgccaacaaacggcagttgtatatttgtaaaagaagaaatatggaatattgacctgagagct

SEQ ID NO: 2906 - protein, 430 aa, Panicum virgatum
  misc_feature (14)..(61): Pfam Name: Myb_DNA-binding Pfam Description: Myb-like DNA-binding domain
  misc_feature (67)..(112): Pfam Name: Myb_DNA-binding Pfam Description: Myb-like DNA-binding domain
  misc_feature: Ceres Clone ID no. 1769439
  misc_feature: Bit score of 808.6 for HMM based on sequences of Figure 1
  misc_feature: Functional Homolog Of SEQ ID NO. 2880
MGRHSCCYKQKLRKGLWSPEEDEKLMNHITKHGHGCWSSVPKLAGLQRCGKSCRLRWINYLRPDLKRGAFSQEEEDLIVELHAVLGNRWSQIAAQLPGRTDNEIKNLWNSCIKKKLRQKGIDPNTHKPLAKADRNGAAPTISTERTSGSSDVNPSSTGALGNLSHLLSETAQSSMLLPVYDKNQSEAPHLARPKVPPKELFLDQLTTGHKSPSTCRSSGQTLYFPFQQPLGYSSESGSGDGASMNSLWFNQNDFNCSTISTVMPPVSPSALSTSMGLNLPPDNPRHGGTGIGSASVDSFYWDGTNPSSSSSTGSRGSNSLGFEPQSTSSILENSVFPWTDIAQEKDTRAHLGEELKWPDLLHGTFAETTIAMQNQSQSLYDDVIKAESQFSMDGMCASWYQNQQPQQQLQAAPDMYDKDLQRMQVSFENI

SEQ ID NO: 2907 - protein, 428 aa, Oryza sativa subsp. japonica
  misc_feature (14)..(61): Pfam Name: Myb_DNA-binding Pfam Description: Myb-like DNA-binding domain
  misc_feature (67)..(112): Pfam Name: Myb_DNA-binding Pfam Description: Myb-like DNA-binding domain
  misc_feature: Public GI ID no. 115436030
  misc_feature: Bit score of 861.8 for HMM based on sequences of Figure 1
  misc_feature: Functional Homolog Of SEQ ID NO. 2880
MGRHSCCYKQKLRKGLWSPEEDEKLMNHITKHGHGCWSTVPKLAGLQRCGKSCRLRWINYLRPDLKRGAFSQEEEDLIVELHAVLGNRWSQIATRLPGRTDNEIKNLWNSCIKKKLRQKGIDPNTHKPLAEVDRSKATPTISNDRTSESSDVDPSSGVALHNLSHLLSETAQSSELLPVKVTKPRTQAPGLARLKVPPKELFLDQLTSGHENLPSCRSSGPIPNFPFQQLLCYNNDFNSMDVGNRNSLWYNQNESSSSTISTVMPPVSPSTLSTSTGLNPSPDNANSRGTGIHNSQFYWDTNNPSSSSSTGSSGNNGLGFELQSTSSLLETNIFPWSDLAPEKDSQAQLEEELKWPDLLHGTFSEMPAPMQNLSQSLYEDVVKAESQFNMEGLCAAWSQNLLPQQHLPVVSDMYDKDLQRMSLSFENI

SEQ ID NO: 2908 - protein, 428 aa, Oryza sativa subsp. indica
  misc_feature (14)..(61): Pfam Name: Myb_DNA-binding Pfam Description: Myb-like DNA-binding domain
  misc_feature (67)..(112): Pfam Name: Myb_DNA-binding Pfam Description: Myb-like DNA-binding domain
  misc_feature: Public GI ID no. 125525446
  misc_feature: Bit score of 862.8 for HMM based on sequences of Figure 1
  misc_feature: Functional Homolog Of SEQ ID NO. 2880
MGRHSCCYKQKLRKGLWSPEEDEKLMNHITKHGHGCWSTVPKLAGLQRCGKSCRLRWINYLRPDLKRGAFSQEEEDLIVELHAVLGNRWSQIATRLPGRTDNEIKNLWNSCIKKKLRQKGIDPNTHKPLAEVDRSKATPTISNDRTSESSDVDPSSGVALHNLSHLLSETAQSSELLPVKVTKPRTQAPGLARLKVPPKELFLDQLTSGHENLPSCRSSGPIPNFPFQQLLCYNNDFNSMDVGNRNSLWYNQNESSSSTISTVMPPVSPSTLSTSTGLNPSPDNANSRGTGIHNSQFYWDTNNPSSSSSTGSSGNNGLGFELQSTSSLLETNIFPWTDLAPEKDSQAQLEEELKWPDLLHGTFSEMPAPMQNLSQSLYEDVVKAESQFNMEGLCAAWSQNLLPQQHLPVVSDMYDKDLQRMSLSFENI

SEQ ID NO: 2909 - protein, 428 aa, Oryza sativa subsp. japonica
  misc_feature (14)..(61): Pfam Name: Myb_DNA-binding Pfam Description: Myb-like DNA-binding domain
  misc_feature (67)..(112): Pfam Name: Myb_DNA-binding Pfam Description: Myb-like DNA-binding domain
  misc_feature: Public GI ID no. 56605400
  misc_feature: Bit score of 857.3 for HMM based on sequences of Figure 1
  misc_feature: Functional Homolog Of SEQ ID NO. 2880
MGRHSCCYKQKLRKGLWSPEEDEKLMNHITKHGHGCWSTVPKLAGLQRCGKSCRLRWINYLRPDLKRGAFSQEEEDLIVELHAVLGNRWSQIATRLPGRTDNEIKNLWNSCIKKKLRQKGIDPNTHKPLAEVDRSKATPTISNDRTSESSDVDPSSGVALHNLSHLLSETAQSSELLPVKVTKPRTQAPGLARLKVPPKELFLDQLTSGHENLPSCRSSGPIPNFPFQQLLCYNNDFNSMDVGNRNSLWYNQNESSSSTISTVMPPVSPSTLSTSTGLNPSPDNANSRGTGIHNSQFYWDTNNPSSSSSTGSSGNNGLGFELQSTSSLLETNIFPWTDLAPEKDSQAQLEEELKWPDLLHGTFSEMPAPMQNLSQSLYEDVVEAESQFNMEGLCAAWSQNLLPQQHLPVVSDMYDKDLQRMSLSFENI

SEQ ID NO: 2910 - protein, 371 aa, Dendrobium sp. XMW-2002-2
  misc_feature (14)..(61): Pfam Name: Myb_DNA-binding Pfam Description: Myb-like DNA-binding domain
  misc_feature (67)..(112): Pfam Name: Myb_DNA-binding Pfam Description: Myb-like DNA-binding domain
  misc_feature: Public GI ID no. 28628949
  misc_feature: Bit score of 522.5 for HMM based on sequences of Figure 1
  misc_feature: Functional Homolog Of SEQ ID NO. 2880
MWRHSCCYKQKLRKGLWSPEEDEKLLKHITKYGHGCWSSVPKLAGLQRCGKSCRLRWINYLRPDLKRGTFSQQEENLIIELHGVLGNRWSQIAAQLPGRTDNEIKNLWNSCIKKKLRLRGIDPNTHKPLAETEVQLAEIDSADQPAPEPEKHTVQQTETGVPNNSVRPGNSPAASYFSLPDLTYSPDCGGSIGQIQQFWLNQSGKFFSNNNSNSEFSFNSVSSLVPSVPRSTLSTSKELKPLTSLLMENSPSGFYWETGNSSNSSASSGSNDPLFDGSIFQWTQLIPERDINVQLHGETEDLKWSEYLNGSIPLSTELQSQNPELCNGMKAEEQFGIDGLSIWLQNHQQQQQQQQQASNNYGKDSQRDIIC

SEQ ID NO: 2911 - protein, 426 aa, Zea mays
  misc_feature (14)..(61): Pfam Name: Myb_DNA-binding Pfam Description: Myb-like DNA-binding domain
  misc_feature (67)..(112): Pfam Name: Myb_DNA-binding Pfam Description: Myb-like DNA-binding domain
  misc_feature: Public GI ID no. 194698774
  misc_feature: Bit score of 768.7 for HMM based on sequences of Figure 1
  misc_feature: Functional Homolog Of SEQ ID NO. 2880
MGRHSCCYKQKLRKGLWSPEEDEKLMNHITKHGHGCWSSVPKLAGLQRCGKSCRLRWINYLRPDLKRGAFAQDEEDLIIELHAVLGNRWSQIAAQLPGRTDNEIKNLWNSCIKKKLRQKGIDPSTHKPLTEADRGGAAPTISTERTSGSSDVNPSSTGPLGNLSPLLSETAQSSMLMPVYDKNRAETPNLARPKLPPKELFLEQLTAGHESPSTCHSSGQTLYFPFQQPLGYNSESGSSDGANMNSLWFNQSDFNCSTISTVMPPVSPSALSTSMGLNLPPDNPRHGGTGIGSTAVDSFYWDGTNPSSSSSTGSRGSNSMGFEPQSTSTILENSVFTWTDIGQEKDTRAHLVAELKWPDSFAETTTAMQNQSQTLYDDVIKAESQFSIEGICASWFQNQQPQQQLQVAPDMYDKDLQRMQLSFENI

SEQ ID NO: 2912 - DNA, 1011 bp, Arabidopsis thaliana
  misc_feature: Ceres Annot ID no. 845710
  misc_feature: Encodes the peptide sequence at SEQ ID NO. 2913
atgggaagacattcatgttgttacaaacagaaactgaggaaaggactttggtctcctgaagaagatgagaagcttcttcgttacatcactaagtatggtcatggttgctggagctctgtccctaaacaagctggtttacagagatgtggaaaaagttgtagattaagatggataaattatttaagaccagatttgaagagaggagcattttctcaagatgaagaaaatctcattattgaacttcatgccgttcttggcaatagatggtctcagatagctgcacagcttcctggaagaaccgacaatgaaatcaagaatctttggaattcttgtttgaagaagaaattgaggctgagaggaattgacccggttacacacaagctcttaaccgaaatcgaaaccggtacagatgacaaaacaaaaccggttgagaagagtcaacagacctacctcgttgagactgatggctcctctagtaccactacttgtagtactaaccaaaacaacaacactgatcatctttataccggaaatttcggttttcaacggttaagtctagaaaacggttcaagaatcgcagccggttctgacctcggtatctggattccccaaaccggaagaaaccatcatcatcatgtcgatgaaaccatccctagtgcagtggtactacccggttcaatgttctcatccggtttaaccggttatagatcctccaatctcggtttaattgaattggaaaactcattctcaaccgggccaatgatgacagagcatcagcaaattcaagagagtaactacaacaattcaacattctttggaaatgggaatctgaattggggattaacaatggaggaaaatcaaaatccattcacaatatcgaatcattcaaattcgtccttatacagtgatataaaatcagagaccaatttttttggcacagaggctacaaatgttggtatgtggccatgtaaccagctccagcctcagcaacatgcatatggccatatataa

SEQ ID NO: 2913 - protein, 336 aa, Arabidopsis thaliana
  misc_feature (14)..(61): Pfam Name: Myb_DNA-binding Pfam Description: Myb-like DNA-binding domain
  misc_feature (67)..(112): Pfam Name: Myb_DNA-binding Pfam Description: Myb-like DNA-binding domain
  misc_feature: Ceres Annot ID no. 845710
  misc_feature: Bit score of 418.6 for HMM based on sequences of Figure 1
  misc_feature: Functional Homolog Of SEQ ID NO. 2880
MGRHSCCYKQKLRKGLWSPEEDEKLLRYITKYGHGCWSSVPKQAGLQRCGKSCRLRWINYLRPDLKRGAFSQDEENLIIELHAVLGNRWSQIAAQLPGRTDNEIKNLWNSCLKKKLRLRGIDPVTHKLLTEIETGTDDKTKPVEKSQQTYLVETDGSSSTTTCSTNQNNNTDHLYTGNFGFQRLSLENGSRIAAGSDLGIWIPQTGRNHHHHVDETIPSAVVLPGSMFSSGLTGYRSSNLGLIELENSFSTGPMMTEHQQIQESNYNNSTFFGNGNLNWGLTMEENQNPFTISNHSNSSLYSDIKSETNFFGTEATNVGMWPCNQLQPQQHAYGHI

SEQ ID NO: 2914 - DNA, 303 bp, Panicum virgatum
  misc_feature: Ceres clone ID no. 1767521
  misc_feature: fragment of Ceres Clone ID no. 1767521 for RNAi construct
ggcagctgctgcttctgcttgcctgcctggctgcatctgcaggctagcatcgatcgcacaccagagtgctcgatcagccaaccaatcaatccagcagccatccggcgtcagcctccgcgccgactggccggatccttctcagcggcggcacgccatgaccaagcaaaagatcgtgatcagggtgaacctggcgagcgagaagacccggtccaaggccatggcgctggtcgccagagcggacggggtgagctcgatgggggttaccggcgacggcagggaccagctggaggtggtcggcgacgg

SEQ ID NO: 2915 - protein, 135 aa, Panicum virgatum
  misc_feature: Ceres Clone ID no. 1871180
  misc_feature (6)..(73): Pfam Name: HMA Pfam Description: Heavy-metal-associated domain
  misc_feature: Bit score of 316.1 for HMM based on sequences of Figure 50
MAAKKVVLKIDLHDNKDKQRVLKAVSTLHGIDSISVDMKDSKLTVIGLADPVDVVAKLRKVGAAHILSVGPAKEEKKDEKKDGDKKDGDKKDGDKKDGDKKVVVYPPPWYAGQYPYYPHYVVHSAEEDPNSCVIC

SEQ ID NO: 2916 - DNA, 1042 bp, Panicum virgatum
  misc_feature: Ceres Clone ID no. 1871180
  misc_feature: Encodes the peptide sequence at SEQ ID NO. 2915
gcattgaactcgccctcggttcgttccagcgcttgcccatcggactcaccgccgagacgaagccccacaacatccccccagaccccagccagcttctctctcagccccctccgcttgtcgcgttgcggacccggcgcacgccggcccgcccagatatagagcgaacagagccgccggccagacagacactcgaagcggttgcttggtgcggcaagggagaaggatcatcagaccccagttggtttactactagccggccatggctgccaagaaggtggtgctgaagatcgacctgcacgacaacaaggataagcagagggtgctcaaagcggtctccactctccacggtatcgactccatctccgtggacatgaaggactctaagctgacggtgatcgggctcgccgaccccgtcgacgtcgttgccaagctgcgcaaggtcggggccgcccacatcctctccgtcggcccggccaaggaggagaagaaggacgaaaagaaggacggcgacaagaaggatggcgataagaaggacggcgacaagaaggacggcgataagaaggtcgtggtgtacccgccgccgtggtacgccgggcagtacccctactacccccactacgtcgtccacagcgccgaggaggaccccaactcctgcgtcatctgctgattgccgatccccgcccggtttttgtaaattcctagttggcctgcctgcctacctcgagctccagcgtcagtgatcgccggctgggacccggaccagggccggggctgcggtggttggccgctgcgctcagctctatgcctctattccctgggttggttggcccgtccgcaggtcgttatatgatgacgatgacgatggccggagcaattacgcaggcgatccaggagtagttggtgggatttcaggttgcagcgccattgctgatcagcgagttgtgtagtgttcatagcatattgtatctgggttttgtccttgctatttgggtgttgaggcatgaaactatagacatatataaaggttaactgaacatacact

SEQ ID NO: 2917 - protein, 141 aa, Sorghum bicolor
  misc_feature: Ceres Annot ID no. 8703443
  misc_feature (5)..(72): Pfam Name: HMA Pfam Description: Heavy-metal-associated domain
  misc_feature: Bit score of 332.3 for HMM based on sequences of Figure 50
  misc_feature: Functional Homolog Of SEQ ID NO. 2915
MVQKVVLKLDLHDNKDKQKVLKAVSTLHGIDSISVDMKDSKLTVVGLVDPVDVVAKLRKVGAAAIVSVGPAKEEKKDGDKKDGDKKDGDKKDGDKKTPPPVILYPHHQWYPYAAAQYHPHPYPPQYVVHSAEEDPNSCVIC

SEQ ID NO: 2918 - protein, 137 aa, Zea mays
  misc_feature: Public GI ID no. 194702514
  misc_feature (6)..(73): Pfam Name: HMA Pfam Description: Heavy-metal-associated domain
  misc_feature: Bit score of 316.2 for HMM based on sequences of Figure 50
  misc_feature: Functional Homolog Of SEQ ID NO. 2915
MAAKKLVLKLDLHDDKDKQKVLKAVSTLHGIDSISVDMKGSNLTVVGLADPVDVVARLRKVAAAEIVSVGPAKEDKKEGDKKEGDKKKKDDEKKQQVLWYPHPWHAAAAAQQYHPHPYPPQYAVHSAEEDPNSCAIC

SEQ ID NO: 2919 - protein, 147 aa, Triticum aestivum
  misc_feature: Ceres Clone ID no. 699934
  misc_feature (4)..(72): Pfam Name: HMA Pfam Description: Heavy-metal-associated domain
  misc_feature: Bit score of 338.5 for HMM based on sequences of Figure 50
  misc_feature: Functional Homolog Of SEQ ID NO. 2915
MKKVVLKLDVHDDRHKAKALKAVSGLHGIDQLGVDIKDQKMTIVGTVDPVAVVGKLRKLFPAVQILSVGPGKEEKKDDKKDGGGDKKEGDKKDGDKKDGGDKKQQEAKPAMSVYPPYGYAHYGYPPPPPPRYVVHSAEEDPNSCVIC

SEQ ID NO: 2920 - protein, 125 aa, Panicum virgatum
  misc_feature: Ceres Clone ID no. 1999925
  misc_feature (6)..(73): Pfam Name: HMA Pfam Description: Heavy-metal-associated domain
  misc_feature: Bit score of 269.5 for HMM based on sequences of Figure 50
  misc_feature: Functional Homolog Of SEQ ID NO. 2915
MAAKKVVLKLDLHDNKDKQKVLKAVSTLHGIDSISVDMKDSKLTVIGLVDPVDVVAKLRKVGAAHILSVGPAKEENKDDKKDGDRKDGDKKAVVYPPPWYAAQYPYYPHYGVRSAEEDPNSCVIC

SEQ ID NO: 2921 - protein, 122 aa, Panicum virgatum
  misc_feature: Ceres Clone ID no. 1830084
  misc_feature (6)..(73): Pfam Name: HMA Pfam Description: Heavy-metal-associated domain
  misc_feature: Bit score of 263.1 for HMM based on sequences of Figure 50
  misc_feature: Functional Homolog Of SEQ ID NO. 2915
MAAKKVVLKLDLHDNKDKQKVLKAVSTLHGIDSISVDMKDSKLTVIGLVDPVDVVAKLRKVGAAHILSVGPAKEEKKDDKKDGDKKDGDKKAVVYPPPWYAAQYPHYVVRSAEEDPNSCVIC

SEQ ID NO: 2922 - protein, 133 aa, Panicum virgatum
  misc_feature: Ceres Clone ID no. 1822001
  misc_feature (6)..(73): Pfam Name: HMA Pfam Description: Heavy-metal-associated domain
  misc_feature: Bit score of 197.3 for HMM based on sequences of Figure 50
  misc_feature: Functional Homolog Of SEQ ID NO. 2915
MAAKKVVLKIDLHDNKDKKRVLKAVSTLHGIDSFSMDMKDSKLTVIGLADPVDVVAKLRKVGAAHILSVGPAKEEKKDEKKNGDKKDGDKKDGDKKDGDKKVAQIHFGIYSFDNDAAEADGARSSAQLRETAG

SEQ ID NO: 2923 - protein, 140 aa, Zea mays
  misc_feature: Ceres Clone ID no. 326580
  misc_feature (6)..(73): Pfam Name: HMA Pfam Description: Heavy-metal-associated domain
  misc_feature: Bit score of 303.8 for HMM based on sequences of Figure 50
  misc_feature: Functional Homolog Of SEQ ID NO. 2915
MAAKKLVLKLDLHDDKDKQKVLKAVSTLHGIDSISVDMKGSNLTVVGLADPVDVVARLRKVAAAEIVSVGPAKEDKKEGDKKEGDKKKDDEKKQQVLWYPHPWHAAAAAAAAAQQYHPHPYPPQYAVHSAEEDPNSCAIC

SEQ ID NO: 2924 - protein, 137 aa, Oryza sativa
  misc_feature: Public GI ID no. 32488374
  misc_feature (6)..(73): Pfam Name: HMA Pfam Description: Heavy-metal-associated domain
  misc_feature: Bit score of 234.8 for HMM based on sequences of Figure 50
  misc_feature: Functional Homolog Of SEQ ID NO. 2915
MAMKKLVLKLDLHDDKDKQKAIKAVSTLHGIDMISMDMKGQKLTVVGDVDPVDVVGKLRKGWPSASLLSVGPAKEEKKEEKKPEEKKDDKKPEQPKLVFYPPPPAWHAHAAPPSYSYPPPQYVVHSAEEDPNSCVIC

SEQ ID NO: 2925 - DNA, 390 bp, Panicum virgatum
  misc_feature: Ceres clone ID no. 1871180
  misc_feature: fragment of Ceres Clone ID no. 1871180 for RNAi construct
ggggtcggcgagcccgatcaccgtcagcttagagtccttcatgtccacggagatggagtcgataccgtggagagtggagaccgctttgagcaccctctgcttatccttgttgtcgtgcaggtcgatcttcagcaccaccttcttggcagccatggccggctagtagtaaaccaactggggtctgatgatccttctcccttgccgcaccaagcaaccgcttcgagtgtctgtctggccggcggctctgttcgctctatatctgggcgggccggcgtgcgccgggtccgcaacgcgacaagcggagggggctgagagagaagctggctggggtctggggggatgttgtggggcttcgtctcggcggtgagtccgatgggcaagcgctggaac

SEQ ID NO: 2926 - protein, 328 aa, Oryza sativa
  misc_feature: Ceres Annot no. 1224770
  misc_feature (10)..(248): Pfam Name: Epimerase Pfam Description: NAD dependent epimerase/dehydratase fam
  misc_feature: Bit score of 397.8 for HMM based on sequences of Figure 41
  misc_feature: Functional Homolog Of SEQ ID NO. 2323
MVTGRSEQMVCVTGAGGFIGSWLVKELLHRGYFVRGAMREPADIKNAHLHVLDGAREGLSLYRADVLDRNSLRAAFALCDGVFHVASPVSNDPELLPAAIEGTKNVINAAADMGVKRVVFTSSYGAVHMNPNRRSDQIVDESCWSDLEFCKQTQNWYCYAKMLAERTAMEEASKRGVNLLVVVPAVTVGEMLQPTLNASVHRVATYMRGTKSAYPNAVAAYVDVRDVARAHALVYEHPDARGRYLCIGSVLHRSEFVRLLRELFPQYPITSRCKDNSKPMVKPYKFSVQRLETLGMQFTPLKESLYRTVISLQDKGHLPAAISRRSAL
